United States Patent Application Publication US 2008/0039413 A1 - sequence listing, part 26

SEQ ID NO: 3425 - DNA, 444092 bp, Mus musculus
  misc_feature (1)...(444092): n = A, C, G, or T/U
aatcaaagactagcctctaggatgtataagaactctcaaagctcaaaaatttttctaaaaaattcatttataaaatggtcaaaagtgagtgtaatggctcatacttgtgatcccaagtttgaggcaggaggattaccatgagttccagactggtattcactacatagaaaatggtcaaaaagttgtgaacagacatttcaccaaagaaaactatatacagttaacataataaaaggttgaggtcatggcttgtcactcaaggatgaggactctagttcacattcctagaaaccatgtaaaaaacatgtctctaataatctcaattttcctacggtgagactgcgggagagacaggaggatccctggaagctttatgtgcacagcagggaacaagacaccttgtatcaaataagcaggaggctaaggacacacacctaagattgtcctctgacctcctcagggccctggcacagatgnnnnnnnnnnnnnnnnnnnncctcccttcccccctccccctcttcctccttcctttttcccctttctcctcctccttctttctctctctctctgtgactactacttcttcttccttctcctcttcctccttcctctctctttctcttacccctctgtctttctctctctctctgtcacagtcacatacacagatttttaaaaatgatgtccatcctcattagcccttaaataaatgtaaatttagactacaatggactatcactgtctacctatcatgactgatgaaacacagttataaatgtgggtaaatcttcagcgacatggaaacagtcgtgcttggctggtgctagtggaaaatggtgcagccacgctgaaagttagtttagtcagttctctctctctctctctctctctctctctctcaaacactattatttaaaatttgtcattaaaaacttaaacatgaaattactgtgccaactagcatttgcatttgtggacatttgtcccaggaaagaatgaaaatgtatattcacataaaggtgtttacagtcactttattcctaacagtcccaatgtagaaacaacctaggcggttaaacaaatgtggaacatccatgccaggggacggcacactgtgatacaaagcaaccagctgttgacacatgggatcatgagatcccttaggtgagcctgggcacttacaccaggcagagtaaagtcaactttcaaagttgtgtcttgcaatttttttaaaaagatttatttatttgttttatgtaagtacactgtcactatctttacacaccagaagagggcatcagatcccattgcaggtggttgtgagccaccatgtggttgctgggaattgaactcaggacctctggaagagcagtcagtgctcttaactgctgagccatctctccagcctacaattattatttttttatagtagtctcaagatgagaaaataatagaaataagattacttgtctctagagtttggggatgaaaaggggtgagtatgttcacgtgagaaactcttatgctagcaaagctctcgtcaaagccagggtcctggctgagatgctgctaaagggtttaccaaatgctagtagaagatgagatggactgaggagcacacaggacacgtttgtgtcactgcctgaaactaagaagggctggagaggttgatgagtggctacggcacaagcaggaaagcctgaggtcagatccccaacccctgcaaaagtctgctgtggccttctgtctgctcccagtgccatgaataaagaggcctgtggatgctcggggctctctggccaggcaggccagcccaaatggggaagtccctggctcagtgagtgactctgtctcaaaacaataaggcagagagccgtagaggagcagttctcaaccttcctagtgctgtgaccctttaatataattcctcatgttgtggacatggggagcatgctttgttgctacttcataactgtaattttgttactgttataaattgtaaatatctgtgttttcccatggctttaggtgacccttggaaagggtcagtagaccctcaaaggagtcatgaaccatagattgagaatgctgcaatagaggaagacatttcacacctacctctagcctccactagtgcactcaagcatgagcacatttgcacatacacataccacccccacactgtaagtgggaacttgaaagagggcccagaggttcagagtacacatagctcttgcagaggacctgagttcagttcctagcatccacactgaatggctcacaactgcttgtaactctagttcccggggatccgatgtccttttctggtctctacaggcacctgcacccatgcacataaccacatacacagatgtacatgtaattaaaaaaaaacactttcataaaaaaatctatacgtaatcatgtaagatttaattcacatgcagtaagagactgtaggcctgtggaagtatgataaggtccacacagtgcgtcagtggggtcaggtaaggatgcgcgtgcagcctttgcttgggttgtcttaagtgtgagctgtttgagatggttaggatgctagattgtttttcttcttattcatagatgtttgatttgtgcccgtaatagactgtgtttaaagatgagaaacataaggaacccaacgatgaaatacgagataattaagggtggaaagacagcaagcctacaacgctgcctcagaattgccattgccaatctgtgaacagcattcatctgataagaatcctcagatggacccttgcgatgcctttggtacttcaaaaaacagcgttaaaagcaagaaagaaaatagggtgacaattatatccaatttggatttgcatctgagaataaagcctttatccacacctacaatgtgacatttgcagagtacttgtaaatggtggcccggaatccttcccttcctgtcatttataaattaaacatagaaattataaaaataaaacagtagtattttaagcgtacaaatctagacattttgattttaatttgttttactttgaagcagggccgcttgcatcccaggttagccttgaacttgatacatggttgaggataaccttgactgatgtccggaactgtacctcctgagtgtctgctgggtttatgtggtgctgggggccaactaaggctttgtatctgatgtgcaagcatgatgccagctgaactgtatgccagtcccagttccagaaatttaggcatcaatttttggaagatttttttttttttttttgctcatgattaatgctatgtcagtacctcatctttctctttgccatggtgtcacctctcagtatatttgtcataaagctaccctttcctcatagactttaacagaaattattgtctatcattcatcttccggctattattactgattgcactaaagcaaactttaggacacagtagcttatgtaataccctgaaagacttagttgaaaacaacagatctgtcttctgggtgagtactacaccaaaatggcaggattatttaaaaatggttttgagcggggttgtagtgaaaggcatttgcaagtcacatatggtcaggcaaggctgatgtgtgcgcatgcatttgtcagctttaaacatcttgtcaagtcacttgctgtgtacctactgtctctatctggtgccgttaggaactagcaggtcctggttgattgattatatattccctataacaggaaactgccacaatctgaatgctgggatggcatgcaaaacctttgacctttgccctgcacggagaccttgtcaaataacgggtagagcacactctcacatgcaaagtaggaatgcctcccatactgcactttgtcatcaatcaaattaatttaccccagcttttatttatattctggcttcatgtgtgatatattctcctacaacttgcagtgagaagcccccagttcaactgatctaggaaccatgagaaatctaactcccaagcttcaaagctggttcgatcagtggctcacccaagacctagattctcactctgtccatcctccctgggtcagaatagctgctctcaagagcacacggtggtggccatgagtacacgagaccctcatgactaatgatggtatccagaagagaagcattatgtctttctgggattctccttaccctctgtcctcctaggccaaacctgcccctcccaccaacactttgattgaccaatcaccatcaatgtcttggatggtgctgacagtgagtctctgaacaggagtgacatgctacaggcaggaaagactagaggaaagaatcttgagttggcaacaaacacgtgtctttcaccacaactctgttcaaaaccccttttacattttgagtctaccggggctcttcaagattacatggttgggttctctttcatgacaagggtttgtgttgaggaggacaaaagaaataggcttctcacagaccttacctatttgaaggagctggagtgtgagatatatgttggctatcgttggtactggacacagaatgaccatagtgatcacaagggaccaggtcagatctagctctggcgttttccagccagtcataagttttggttagggataggtgttatcattatagttagtatttaggagtagggtttagggtgagagttaaagttaagggttagggtgagtgaggatgaggtttatggctagagttagggttagtatttaaagttagtataagattagagttagatagtgtttgggggtagggtaggaggccagagaaagtgttgggattaaagttagtgttgaaggttaggcttgggtttggggtttcaggttatggttggtggtttaggttcagggctggagtctatgtataattatgatgcttattttaatatgtattatttgctagtatgatggtaataatggcaatggtactagacaggactttgtctctcttagcagctaatatctggcctttttcttatctgccccatctgttctttccttgtctatgctgtagctggaacagctttttaaagatataccatcaatcaagccattttcttgttcaaaagcatgcactgcccctgtgacacctatagtcagaactcaagtctgtaatcctcaggtccttgccgacatctctatcttccgcctttctagccgggtccacagctaagccaccctggtccagctgatatcaagtccgttccccacccctgttctgggcctctgtctaaatgggctgtggctagatgctctctcacccttccctaccaactcagctttcagctctaagctcctgcaaaggcagaactttctctgatgacccttaaaaaggcacaaagggcaactagtaggtgctaacactttactgaggagaacaatattagtgacagacgctcgagtccgtattttccatttttaaaatggcagttggctgtctgtcctttgctttccttccaggctcttctgttccccccccccctcctgaccccttcaggcagtgatacttagttgcatggaagtctgattgtttcattctgattttaacataccatgggccctgactcctaagagcagtaagctcactttcctcctattgccagagcctttcttgggttccttgtgccatagatctctctcctaagggtcctggggcttttgtccctggagcagagtcatggagaagggcttccttgctcatctctgtccatgttttagtacccacaatgcccttgttcatctccctccatgtttcagtacccacaatgcccttgttcatctccctccatcttttagttcccataatgccctttccatcattacatcttttccttcatcctaacttctgaattgaaatgcttcttgatcagccttgaaatgtcctcaaacacagttatctcctggctgagtctcatctttaccttcatgttcctctaccttaaaacagctgtctaggctgggagagatggctcaggggccagatgccttcagcacaagcatggggactgagctttaaccccagaacccatagaaaagcaaagcataggaacatgaagctgtcacccagcgctgggagccagggaaaggtggatctggagatgtgatggttattccaatagaatggaagtcacaagtcccacattcaatgagaggtcctgtctcaaaaactaaggtgaaaaatgacatgacactcaacagtgaacctctgcactgtgcacttgagcatacacacacacacacacacacacacacacacacgcaccccacataccccccacacacataccccacacacataacctacacacatcacatacacacactcacacgccacacatatacactcacacacacatttgtgagtgtaatttctcatttagatttattattcctcgctcacactccctccctgcctctgcacggttccatgaatgattgtttaagagctcagcgctatcactgggcttggggggctttgacatcagagatcttttcacagcaaagtgattcaatttgataccaacttctgtagagaccaagaaatggttactccactatagtggagaggaaggttcactgtagatccgagggagaaaacagccagaggcttctggaagagtccagactgagccagatcagcaggctgaaccaggctatgaaggagggatgtagggtaggggttggggtataacggggacaagagaggaagagagaggaaccaggagccaagtggccaagaggctacatagccaaaatggctgggtcatatagggcagagaagctgggggaagggaggtgatgctcagaggctggagaggttgaggagagggggccgggtatggcagccaggatgaccctgtgacaggtacttgctgagagcctgccagccagtctcatttctgagaataagttaaataggcacctcagtagccatttgtcctgagttggagaccttataactagtatgataaagacacagtcattttagatagaaagtggtcttgggcnnnnnnnnnnnnnnnnnnnnnnnnnnnnnnnnnnnnnnnnnnnnnnnnnnnnnnnnnnnnnnnnnnnnnnnnnnnnnnnncccccccgcccccccctgccacccagggctagagagttggctcagtgattcagagcacagattgctcttccagaggacctggagaccggaagagggtgtttattcctggaaatggagttacaggtgacagtgagccaccatgtggttgctgggaattgaacccaggttctctgcactgttcttgcagagtttgattcctagtggctattctggtggctcacaaccacctgtaactctagctcccaggggacctgatgccctcttctggcttccttgggtacctgcacatacatgtacagcccccacatttgcataattaaatcttaaaaacaaaaacaaaacactggaaaagtaaaaaaacaaaaacaaaacagtctctgttagtctgggctacacagtgagaacctgcctcaaaacctaccaaaacaagggatgtttaaacttctagacctcatagagtagaagtatattgatcacttccgcttgtgtttctgaatctgtacagctgagctagtgcactaacgcaatttatgttcggagcccttccaccccaaacgttctgaattgtacaaattcaaaattttaccttaaaaaaaaataaataaacagggctggtgagatggctcagtgagtaagagcacccgactgctcttccgaaggtccggagttcaaatcccagcaaccacatggtggctcacaacccatctgtaacaagatctgacgccctcttctggtgtgtctgaagacagctacagtgtacttacatataataaataaataaatctttaaaaaatataaataaacaaagcaacaaaacttcccccaagaatcctagttagctaacgagaagcttgcaagtcctgaaacgaagatgcaaggaaagatgcaagcaaattccaaaagtctctgtgggaaaaccagcttcattcccagcccagaatgtgctagtaaaacaaagaaatacacggtgaaagcacaaagcaactggaagaggcatcagcatgcgtgcggcacccaatgctgcctctcggaggtgtgttcgactccaaccttcccacgtcactttctcttattccaaggtgactcgttatcccactctggttttccgctcagtggtcacaacggctcgccgtggaggtcagcatcagctcttggggagtaatctgaacatctgtttcatagcagtttcgttctccttctccttccttgggaagcatgaagaagcccaacgttgtttagaacattaaacgtggctatttctggtcttggtcagtctgcaggccttgacttatacgtgacctctagttattaaaaaacaacaacctcaaaaaatgaaacaccactctcctgcctggaatcctgcactctggctactgggctgcctcagcgacttgatgcttagaaaagagggatatgcctctttttccacctcatcttggagagctgtgtggtttagtcccatctgcagactggggatgcaagttcagaaggggttgggggagcgggacatcacttctgtgccccctggcacctgttaggggcactcattttctctttctcaagatggaaattgtgcctcacctcctgaattccaggtatattcagagaatccagcctccagccagccttggggattcattcatggatggcattggcagaaaatcatggtcaaatagcagagagcatcattctggccacagccccagggcacagagaataccgctgcctttttatatctgagtgcaaattttggcgctcactggccaagtcacagctgactacgacttggaagtcactttgattttttgcagctgagaagcaattacaaccgggtctgagttgcaccactctctggacagtggtggaaggagggctagatcctacaccaacaacctgagcaagaaaggctctgtcgccccactcactgcagtatcttccggaaccagcccagaggcttgtactccaggggcccaatggaaggacagactcaaccagcctttcatatttccacaatttcttttctatttaactaatcttatctgcagggaagccccgttgagccctcctgcaaatcaggagagatcccaaaggcatgggcaggacagaaagccattggacatccacaccagcacagtaggaggcaggacctgggcaactgtgaggttaggtcgaaagtgacagaggtgtttgcaatttagctgagcacatatgaagagctgtggaggaaagagagaagagaagagaagagaagagaagagaagagaagagaagagaagagaagagaagagaagagaagagaagagaaaagagatggaaaagccaggaagctgaggtcttaggcccaggagaggaaagtgtcttgttttaggaacaagacacgttcccggctcagcctggtcaggcttggcaaatgtcacctgggaatcttgtaagcgtctctagttgggagtaaagaaaactttgctctttcacaggtagttggttctcaatgcagggaggagtgttccctgaatattgcttcagggacatctctcttggtgcaatgtaccgaccccgtaaggtttcacgagaaatggccgctgattgagagcaatcctgcgctttgagcaaagcacaaccttgggggaggctggcccggaaaagagcttagaggagaggaggggtaagtgggaaaacagaggcagggggttgtcacctgctgagcttcctgggagccaggggaaagagagctgtctggcccaggtggtgcagggaacagggaatcctcgcgctctgcttgcgcgccgggctgctctacacctgccgcggggtctgacccgcaagcaggcgggaggcgagcacaggtggcggcgattgggcaggcggggcccggagggtgacgtcacgggctccggtcccggcggcagaaatagggcagccgcggcagcggtggcacagcggcgggcggcggaggctcggagagctggagcttggactatctctagcacgccaggggaccagccgacagccggagacgacccagccgaggacgcggggtccgggtcgccgcctctgtcgccgccacggggcgctccctcccttccacccgagtccggccacctggtcattccctcggccccggccgccgtaggtaagcgggtcgcagctccggagaagatgcgggtgtccgagtcgtgccaccgccgccagctcgtcccgctgctctccgcccgggtcccgacgcccgcagctccgcagctcgctgcagggcccggtgcgggcgttcgcaggttctcactgcccacgcctggagagccaagtttgcgcgcctggctacgggcacgggaccacagggccgggactcggcagggccaccctggatgcgctaggactgggggcttaaagctggggtacatggggtttgacacccggggatcagcggtggggaacggagtgatccttataggcgcgcggggcgccacgcagaactgctctggctgagcccgaagctcgcgatccgcaccgagaccctgcaggcgccgctcttgggctctgaacccccggatggcctcagccaaaccctagcgacagaccctggctcagacctgtgcccttggctgggatctagagtgcggggcgggcatcctttgcaccttcttcccctccgctttgcggggaaacttgcgtccccttgtcgcagcccaaagataatctgcgcctctcttggccctcgttatcccatggccctcagtgtaaggagctcaagaagagggcatcctagcagaaccctgccctggggaccttgtggctttcatcttgcgaggccacagttgttgccagtaagcagctgctgtaacccactgggaagtctctagggagcagtttgtcctgaggatatttaggttgggggtgggtgggtaggtgctaagagcaactgtgctgactgacttcggcccctctttgctccaccgaaggaagagagaccatttctaagtttcagaggagacctgggaaacgcaggcagagcgctgctcttggggcgcatgtcgcctggagtttgggtagcactgcagcacgaggctttgagcactctctgcagctgacaaagccgtgtcccacttggcttcccctatgtctgccacctgaggacttcctgtcctgaaacttgcaagggaagaaactgactggcagcggtcggtagggctcgtggtgcccagaatttggcgagcgtctatgctgtcctttggtcagctcagagttctctgggagtttcccctcgcccccaccaggtctgcattttctcccagagctggtccaccttgccctgcctagaggacttccctccagataaccgtctcttgacactgatgaatagcgcttcggtagtctcccctccgtcccctctaggtgtcgcttctatcgagctttccatgagtgaaagacagcgccagtagctttggtctgttgtcctagtaaatctgttgcaagcctgtgctccaagaattgtactaggtaccctcccctgccacgaggtacccaaatccacccacccctttatatgccttacacagaaatggggtacttgctagccaaaaaatccgtacagagaacaacaccccttggcattttctaaggaggaaaaaagtggggggggaatgaagaagacgtcaggacttttccagaaagccctcaagttatattcctgcccagcagccactggtgatgcaagggagaattttaacagtctgttctcgtccctgatactggccagtatctgttccggtccctctgactctgaggataggctctggtgtggacattggtgtggaaagcaaacgagtcggggagtgactaggacttgtgtggtatcatagccccagcacttctctggcagaacccagtgacttcctgtttcagttgtgtgagaagggacctcaggcccaggttattctgccactgtcagctgaatgctggctttcttcctcctatcatggggcccaatacctcactcttcccaggaagacttcagcctgaaccaaaggtcatccagggaaagggtccatgtgttagcagtcctaattatgttgtcccgggggcttttacttttcctcttagaatttgatgtcaccaagttttgttaattgcagaaaggttctccccatcccaaccccctttcccagagtgagaccagctcgctgaactgggcaatgtcaggactttgattcccctggttgtgcccagtaggtgagagaaggagggagagactgggtcactcactgtgcttttccttctgttaaggaattggaggaccggtttatttactgtgtcctcatgtgatggtcttctatttgacttaatagcctgttccgggaactggtattgaatggttacgttttcacaaacctgtcccaagtgtctaccctacctctggaggtatcttttctctccaagtcccaccttcttgcttatgtgtagttaccatgtttttccaaacaagatgaaattaggtatttcaagagagtgtctctcttaaagtgttttgcctcttactgaataatactaagacatggaacatcaaatataatgggaaaaccacggtttaaaggacatatttaggagttatctgaaggttggacagataagggtgatagaagctgtaggtgaatgtgtaaaacttcagttccaagatgaatgccatcaatttacacattgcacatggaagtatttaggtcttcaattcaccagttgttggataataaggagttcataatcaatagaaaattcaacttagggcagatgagatagctcagtgggtaatggcacatgctctcaggtttgagtttgagccccaagatccacacgtggaagaagagaacagacttctgccagctgttctctcacttttaaacatacacacacacacccaaataaataaatgtaacaaaaacgtagaaaatacgatgccacttaattacattgtgctgcagttagcttggtagatgcttatcttctccaggttggaatttttggggctatttggggaaatttgacgtgcttttcctttttcctaaaacacacgcaaatcaaaactagagtctaaacctttcagcagaaattatgatgtagccactggtttcaggttgagtttgtgcagtccccattcccccaacatcaggcagatacacagaagaggatggcagggctctggggctccccatttgataactcccagttgattgtcaccagggcgtggtgtaaactatagtccgattcaagtaccaagcagatgtttagaaatgcagatgcctccagggtttgctctcttagaggctctaccaaggcatctctgccatttctaagccatttgtgtgtgactaatccatagcgactggcctggtaatgttctcgtgttctggaaaagaggtcaagagagaaagagagctgatgaacagtgtccccagtggctagcattcccacttatcctgaaaggtttggttacaggaatagacaagacaagtcttgccttaagcatataaccatgtaagactctggccactgatcctgcacagcttacatgttggtttatggtctctgggttggggcagactttttttttttaatgaattcatattaggtttggtcttcctctaataacttacatttttagtcatggcttttcaactttcttcaaaaagcaacttggcatttggaatgttgcatcacgctaacttgtcatgactataattttaagcacggaaagagagcacagatacaagtctgttttacagcgcaaatcccgaggtttgcacagagaggctacaccactgacgagcacaaacagggtttggaagaggatgcaaatctgagggtaagaaagcagataggtgttcaggaagtgagatgctaggttagaggataggtctgtgcagtggcttagttccaaaccttcaatgacttactaaatctacaggaggcaggatggcagcacctagctctcctggttgtgagagagtgttgaggaccaggtggggaccagagaaaaaggtgaagtgcctctcttcaaactaagatgtttatcctgccaagtgactgagttgtttggaagctgagactgtctcagctccttagaggaggcctgaaggtctctatcctggtggcgatgtaaccatctggccatgaatgaatgaaacatacaatgagtgaagtgtaatctctgaatgaggtccaagttgatggtcagaatctgcaaccttatgaagagctcatccccacccctgtgatggaggaattcttactaaaggccagcaagatgacttaaattggaacctcaatgaattcaatagcagattgacttcctcaaagtgacttgtgctccctggagttggaggagcatcctgacctcctagcaacctgtgtcatttctcttggagagtgtgccaagctgcacccactctgggagcaggtacagaagggtaatagcttgcctctgaatccttggccatggtcagagccttgacaagcaaaggaggctggttctgggtatctttcaggggcaagaagggactccgggttcagggccttcctcctagcttgccttgtgtagattgactgggtcatgtgaaaaatcactgcctaccgagattacaaactggcaagggtggggaggtatgatggacaggtcatcacagaaccacccacctgctcgttaacatgccatgtagctctggcagggtacttaccctccctgtgaccctgcctcctcttgtcatcagatggggagggaggctagtcactgctttctgcatggagatgaggcatgtctgtagagcagactgaatagtacctgacacatagtaattgctatgtaagtgttaaccaaatagagagtctctatttgcttattagacagatcatcaagattgatttagacccaatattaattcttctttttattgactgaattgtcataaaactcaagttgaaaaatttttaggctgttgctgctctagatgtaatgaattgtcaatcaccctgtgaataaaatgacatccaagacatatccacggtgtaaatgaaatcagctagtggtggccaaactgaactgcgttctataaagaagctgcgtaggcttatttaagcagttgctctggctaacgtgtctccctagctccaaataaggtcttaatagggaatctcagtgcaaactggataaagacccgtaccagctctagctgccaaggctggtactggggtcggaatgtcctgaaacacctctcagaatctagccggcttaatgctcaccctctgggcctgcttcttaaatgaagctacatggtgcttgccaaggcaataattgaaatgaatggattttattttgatactatccattaataataaaacaccagacataattggtcttagattactaggcaaattgaaagtaaagcgttagatttcgtggcttgcatatttcataattccgggacttgacagatgtacattaagtaggatggattttgattatctctgtatttttagtgggtttgggcaaagaggcatgacaaaggaagtaagcagacctttaaatgcaggcgcttacctcacgagcattatttattagtggactaagttatcagcaaatttaaaaaaagaatagaaagcatagtctttctcattctagctcaaattactaaagttagcttttaaaatatgcaaaagtccaatagctgccatctgcagtctctggaacacagctccaggttcaaaagaggataattcatggggaatatgaagctgccctatttattttttaaaaacaaaacagagctgttgcattgtggggaaatattcttttccagccctgcctgagggggttctccttccaccttcccgtccctctgagctctggccgtcacagtcaggcagccttccgctggttcctatcacaggcctcacacaagtagcagctgaagccacactatgcaaaatgcacatcaggtacagagatggtgaccttgtgatgatagtcactggccgcctgggctgcttccctcagctcagctttgccaatggatgccaaaaccaaaaagaatggctgaagaaagaatcagagaaatgggggtctccggagaccttctctataagatagctatccctggtgaccgtgtcctttcataagccagtgtgtggtgtcccacacttgactctgccttttcttcctagtgggcatctgtctctagggggacgcaggcagagaaacatggtacacagcacaagtggctttgtttggtggccatggccactaatgactgagtgagagctcttgtctaggtcagagactcttaaactgtattccggacccctttccacctcttacataaattagatatccagatcagatatctgataataaatcttaaggacgtttacttactctgtaagatttaagtattatttttaagtgtttgtatgctagagagcaggtgcctcccaccccgccccaggcctgagacaccagatccccctggagcctgcctgcgttacaggtggttaagctgccaggagtatcaacaccggatcccctgcaaaagcagtacaagcttttaaccacacagccatgtctccagcccccaggaaatgcagtttaaaacaattctttagtatgcatgcacttttactatttgttaaagatgaaagtaaatttgcatactggtgagatggatgtgcgtgagggattaagctctggcatatgtttgatactgcaggaggaagagcatctttggcgtttctcggagctgattaatattttgattttgtaattgtcagtattgaacaccataccacagaaatacataatacaaaatggcagaagggcgctcgggaccatttcggaaacagttggaaattcggtcctgctcccgagccaaaattcttttaacaagttttatgaaattccagccagcaactcaaatagcaattttaaaaatcaaacattcttacacagtaccatccaaatacatatatactcatttgatacttacatgctgaggaatgacggtaggaaaatattaagagactttgtcttctgtaatcaaaccattatgtttccataagggcagaaaactttgtgtgccgaggtgtggcaggcactactggatggcagtgtgttgtattgtgtgaggcaaagtctcgtgtgctcagagccaaagcagccatggggtggtcattacatggtaagcattgccagagatccagattcactgtgcatttgatctttaattaattactggttctatattttattgtttatggcattctaccgttgtccaatttttaacaacccctccctccaagaggacacactacctttgaggatgtgatccacattagaaagactgaggtcctgagaagagtcatctaaggctgttacttgagtatagggcaggatctacaaggtgtgaatcaatgtcagctgtaatttagtctctaggccaggtcatctgggatgctggcctctaaagaggcctatgtgtttccatttctgtgggccaggccaagatggggcatggagaacctgtaagtaaataccatcaaattgatggctgatgtacacacagagtgaacgtacacttaaaaagtgaacaggcgagccagcgagatggctctgcaggtaaaggcagctgccaccaagcctggtgacctgagattgatccccgggatccacacggtagaggtacagaactgacttctgcaagttgtcccctgacccccaatacatacagtagcatatactcccaccacaacacacaccagcatacctccccacaccccccccacatttaaaaaatattaaaaagttcagctactctgcgcagtctgtcttccctatatcagcacatgaggtttcctgagcactgctcacacctgagcctcagtgtccctcagtctctggtcaacttgaaccgtccctttgttttagtctaggacttgaggaccaagtgagtctcaggaaacaacttccaggttattgggacttccctggctggtgctcagatcctgctgcaaacactgaaataccagaccttatgatgctgttgtgaagttcaccattttgtaaagacagagaggcgttgctacatacttactgttattcctcgttaacatttctttaaacgtgtttatttatttagtgtatgtatgtgggggggtatgtatgccattgtgagacaacttgcagaagtcagctttggggggatcaaacttaggcagtcaggcttagcagcacgtgttatcactggcttggtcacctctccagggtgtcatcactggcttggtcacctctccagggtgttcatcactggcttggtcacctctccagggtgtcatcactggcttggtcacctctccaggagctctgcagcatttcctaagcttcatacgcttagccccaatactttctcaggaaattggggcatagatgtgcccaacagatgtcactcagctgactcaccctgcttgtccttatagatgtggttggtggcattttaagtgggacactgcctagttgcttacattttcagagttcgactgtgtgcctggtaccagctctttcagttctcagcatgctcctgtgaggcctgcaatacagcccccgttttagagacagtaaaatgggcctagatgtaatactatcatttctcccaagtaaaacaaaagggtttgtactacatgttatatttgtatttagattaatctgattcttcatgtgaatgcatgggtgtacatgtgtgtggttgaatgtgcatatgggagtcagaattcaacattgggtgtggttcctcaccagccagccatattgattttttttgagaggcccaaggctgaccaattaattaggcagtgctgactggccagtgagtctctgggctgggattagagatacagactgccactcccagctttttatgtgggtctggggctcaaactcaggtcccaaaaccccatctgcccagccccttaggttgacctgattctatttgcacatcacttgctgtggcttcctcccactgctttccccgatgagcttttattgttttctcaacagactggacaaaatgaaaccaggaggcttctggccacatcttgccctactcggggtctccctgccggccgtgctgggatggatggaccaaggagccagcagaagcccgaatatggttccaggagagtcgcaggcagaggtatggtcccgccactaaggacatagcacttcatacagactgcttttctgtgttacagtgtccgattgtctaatttctctcccacttttagatcaactaggccactcactgtgcaagttcaaattacactcctttttctggtagtggacaggaggcaacaagaggcattgtcacaggtgggctatggctcagaaatctctcatcaatgaaagcacccccctactgtgtttcttcatgacacatttagccacccacagagaaccttccaggactgtcctctctgtgtatttaataaaaaactttacaaattcagactaattggtggcgcacacccgtgcgaactgatgaagtattttaatgacaaaatgtgtcttaaaaaagaaacaggccactctttgggtagatagataaaaaagaaccaagctgagaaagaactggccagctgaggtctggagggagacagctttaatgaacagataagaatgattaatggcatgctaggtgtatataaacccttctaaagagcttagaaaactcactctctgaaacctcccctgagggcctggatgtgctgctaattgcttagtgatctctagtcttaagtatcctacgccctagccctgctctaggtagcaggctcagcgaatttggggtgtcttcatgagtttggggtacatatggaatgtaggatatcttcagaagatgccttgcataggtgctggactttgaaaagtaagcaccccttcaggaaagccacctgggacgtttctctttgcttccaggagctgagcccttatcagggccttcccaggcagccacacttccattgtcttccactgatacatgccggggatcctttctctgtacccgtgtgtctgttcctggggaaggagaaatcaaaattacccgaaaaagtcaacattcccagagagtggataaaggaacacacagcacgagttaggattagcgctttgtttgatcaaatggttctctctttcattgttacctaattgtcctgcgatcccaaacctccgagccttactcttcagggagtttcggaagtgatttaatgcacagcacttctgctgctgaagttggtgctgtgtgattttgtctcaagtcgatgattaaatagaaacactatcgctactgtctaaatctatgaaggacataccttaacgttgctttggaagagtctaatggtggctgcggctgggctggtgagagccgaatttcccatgtgggaagggcttcatttttatactcctatcccaaggggaaaccatcacttaagtcctacagatccatccttgaatattgaatagcaaagcaaacaggcaggccttatgtggagcttactctcctgaaggtggggggctccttggccctctttggcgaatcacttatttcaattaagaggcaagccaattaaagtaggatttagctggcggtgaatggaaggcaagttaatatcacccagagcctcctttacatgaccacttaacaccagggcttcatggctctgtgtaacagcggaggcaggtgctgcatgctggaggagggaagacttctctttgtttggggttatttgtccccccacccctacccctagttccagctgtttctcccatgtccaagaatgtcactggctgcttcaggaaggaggggatgacaacagtctcctggaggcaggtgcagctggccattggtcatacctctcagctgtagctctattttctgctgttccttaactcactgagcctgctcctagctgtgattaatgagagggtcatgctgtgtgggccaagtccgtggaaactgagggtggcttcggccaatgttcagcttctgggagcagagcatttgctgtagtgggggtgcttgctgacgctggttatgctcggaatgcctccctggtatgtgtatatcacatatctggtatgtgtatggagcatgcctgatcatctagcatgttgaggccagagtaggacatagggcatcctcctctattgctttctgccttattcctgtgagactgggcctctcactgcacccggagatagcttcagctgttttgttcgactgggctagatggctatcgagcccaggcattctcaggcttgtatagcaagtgctcttgcctactgagcctcctccctagcccaggccatcttttcttaatatatgtaccctcctgcccctcctctaacccagccattctcaacctgtgggtccggaccccttcacaggggtagcctgagacaatcggaacacacagatatttacattacaattcataacagtagcaaaattatggttatgaagtagccaccaaaacagttttatggttgggggatcacatgagaaactgtattaaagggtcacacagcattaggaagattgagaaccactgccctaacctaagtcctggttctgacgccttttctagaaccttctcagaccactgttaatcatatatgggcttgttttctgaacaagtctttaaaacaaagattgattggctggttgtatttatttgcctgtgtgtgtgtgtgcacgcatgtgtgcatgtgtgtatgtgaagggggaaggggaagggagagggggggagagagagagagagagagagagagaggagagagagagagagagagagagaagagagagagatagagagagagagagagagagagagagagagagagagagagagagagagagagagagagaatagagctagggtgacatgtggttgtctgtcacctgctatgggtgctgggaactgaacccaggtcctctgaaagagtagtgagcactgttaaccacctctccagtccccttttggcccctcttatcttttttcttacttacatgcttctgttttgcatatagatgaagctggttttgtttatctctctcttcctctcaagtgtcttattaattttatgagcctaatgtaggctcaggtttttttttttttttttaagtcaatcaaaactcgatgtaaaatccaggctctgtcctgagatcatcttggttcttctaaactttacactagaacagaaccgggtgtgtggccttcccacctgcatccgggtctctgtgctgtgggctggtaaacagcatcccttgctacctaggagcaacttgaggttctcctgaggttacatcttactgactgatatcaaagttgtccttgaggatcatggcttctgggtcttcacaactcaactcaaggtgtactgaagtcttctggtatcctcctcagagagtcttatttctgggaaggatccaaactaatagagtttttgtgtatatattcctgtgtgtgtgtgtgtgtgtgtgtgtgtgtgtgtgtgtgtgtgtgtactagtggtcagtgttgcgtgtcttcatcactctctaccttattttttgagatacggtctttcattggcctggatcttatatctagcttggctggtcagaaaaccccaataataggttagggctttcatctatacctccccagcactggggctgcacatacatttactgttttatagatgcttatgagatatgtagctggtgtgtatggtacctgtttaatccgacctgcccagtatgggtactggcatccaaagtcagatagatccccatgctttgacagcaagcacttacctcaccagcttcagcaaaaacactttttcataaactaaatgttagatggttttctgtgtgttctcccccagacaatagtgcttctaaaaaacgatcaaatcaagattttctgagatagttgggaagcattaaaaaggtttgacttgtctttaaagttattagaacaattatgtcattgccctaaaagtaaatgaagattaaatgaccaatggatgagtgtgtgcatacgttcacacacatgcacaaacacatattctggaagcaattacatccagtacgaattttagcaaattattgtttattgtacaaagaatgcagttaaaatagcttccaagagttttctgttctacagatgtgggttagaaacgcagctgtagggtgtgcctctttctaccagctgaggagcaggatgtggcctggaatgctaatgccattctggatttaaagaaacgattctgaggtagaattcattggaatctcaggatattgtaacgttgccctctttccccaccttataccatggccaaagtaagctgatcacccttgatcccaaatctgtaatccaacataaggttaggttgggttaagggccaataggactccatacatagaaaataccacacctgacttcacgtgacaggttgcaggcaaaaaggcaggcagactgacagaatcatacaaaattgctgcagggcctggggaaatagctcagtggtttgtactttcagaggacccaaaatctattcccagcacacatatgggttagctcacaaccactgcttaactttagcttcgaggggatcagatgtctctggcatccttaggtattgctctcatgtgcatatgcacgcacacacacagacatatacgcacatacacacacacagacacacacaaacagacacacacacatacatgcatgcatgcacacatacatgtatacacaagcacacacacatatacataattgaaaataaaataaacctttaaaaatttctgcaggctatatatataagaaataaatgagtttcattttttgacttgggtttcatgcctcaaagaagttattatataggtgcaaatattctcaaattcttcccaatcccaaatgctagctatttttgattccaggcatttcagggattttatataatgggcaactaaaacatcagaggagtaaggagaatgatgtcccagtagcacccagagaactgccctgttcttgcagggtgtgtgtttgcagggggtgagtccggggtgctgagtcccagtgacagtgtctgaatatgcatcctttgtgcactttacttggttcgatgctgtgttgtcatgtaccacataactatacatgcaaaatagcatggatccctttaaaactgtaccccagggcttacagaccagccctaggcttggagatcaaactcatgtttccagtgtttagcagactcagagaaaagtctctgaggaacagatatgccagatgggattaactgactccagcctccccaaggtccagacactgtagtggtttgaataggaatggccccccatagactcatgtgtttgaatgcttggcccataggaagtggcactattaggaggtgtggtcttgttggattgggtgtgactctgttggaatggatgtgggcttgtttgaggaagtgtgtcactataggggcaggctttgaggtctcatatgctcaagctacacccactgtggcgcagtctccttctgctgcctgtggttcaagatgtagaactctcagcttcttctccagcaccacgtctatctggataccaccatgctttcccgctgtgatgataatggattaaacttctgaacctgtagcccatccccaatgaaatgtttccctttataagagttgccttggtcatggtgtctctttaccctaactaaaacagacttgaaagtccttattctacaccgcctgaccccttcttaccttttctacaggtgtgggccacagatatagactgttcgtgaccacttatgtcctaactggacctgttactttgcaggttgagatagtaattgtctcaaaagcagtgcattgttgtcccacgtcttatggttcacagcagtgcttccccacccctttcagaaagtccctcctgggagtcccggggaggagggatgagcatctgcggagggggagggcccattccacaggtctccttaccctgcctctgcatggagaaaagaaaatgtcctctctgaacagtcagaggtccaggctggggccttgacatagcctcccacctgcaggcaaacaagtacatagatgtagttttcaaggcagagtatggcagccagtcctcctaaggtgtgtccttgcttgcagagttagtgtggactgtgccctgtcacagtaccttactacgtacttcaactgccnnnnnnnnnnnnnnnnnnnnnnnnnnnnnnnnnnnnnnnnnnnnnnnnnnnnnnnnnnnnnnnnnnnnnnnnnnnnnnnnnnnnnnnnnnnnnnnnnnnnnnnnnnnnnnnnnnnnnnnnnnnnnnnnnnnnnnnnnnnnnnnnnnnnnnnnnnnnnnnnnnnnnnnnnnnnnnnnnnnnnnnnnnnnnnnnnnnnnnnnnnnnnnnnnnnnnnnnnnnnnnnnnnnnnnnnnnnnnnnnnnnnnnnnnnnnnnnnnnnnnnnnnnnnnnnnnnnnnnntgcagttctctgtggctactgtgacagctagtatcaaattgaaagaaacacacaatcacctgggatgatggcctctgtgagggattcttttaattatgttaattgatatgggaagattcatcttaattgtgggttggaccatttcatgggcaggggactttataagtgagaaagaaagcagagaagctggatacgtgcattcattgattgctctctgtgacagctgctttcagtttctgctgccttgacccccccccctgaactcccctctccactaacacccacctccctcccctccggccttggtggactgtaccttgaactgtgagctaaacaagcccttcatcccccaggttgcttttggcagagtattttatcatagcaacaagataggaaactaagacagatgctgagggtggtcacatccctgtccccaataggtccacagacctacccatattgtctcacctttgtctgtgtccacagctgtttagagactgccacatctgggctgacactgtttggagtcttgtgcttactttatccttggacaggggacatagaccaccgcctgtgcatctcatagctcaccccccccacctccgcagcaagcccaccctctctctaggcagactgtattccctttagcattttgacatcatggttgacagagttttaattggccttgaaaagttctgtgacccgggaaaatgagcatttatgagttcacagaaagccattatttttcttcctcttaatttatgcatccaactgttcttgcctttgcagctaaataatctctggctctctcggagtctccgtacccttgtcatggggacattaggccacgcactgtgaatgggtttgcggttccatcttttgggcaagttgtatctgcaactttgccaagccctaactctcaacttaatttatcctctatgacttttgggttatctctctggcttcccactgagagaaccgtgtgggtgccaggctgtccctaagaaccccatgagtggcttctcctttggcatcttgccaaggaatagcagttgtccttctgcctccattgctctggtctctgctatgaggcttctgggccttgtcctgtcactaacgtcagaaagggtagagagtacagcttcaggaaaggagtcctacaatggagcataaagcagcccctgttctctgagtgggagacatttagagaaactacacagggactcagcatgttgctactgaatgggagatgctcaagtggttgctttctgtcacctgtccctttgcttcagctctctgatagagaggggcagggtccttgatgtattattctcttctgtcaaagggtacaaagcaccaggaaccccatctctcctcccaggctggggagctagatcatttggtaggatgtatgcttgattagcatggacgaggtcctgaatctgaccccctatgttacataaaccaaatgtgggggatctgagagctatatgtcaggaccaactttcttttttgcttttatgtttttgaggcagggtctcactaccgagccatggctggccttgaactcacaaaaacccactggcctctgcctcccaagtgctaggactttatttcttcttgaaggtcttggtctgtagactttgaagtcaagctgacttcttagcgctgggattatagttgtataccactgtgcttggaaagatggctgtccttgatgtcaggacaattgagttaaaattaaaaccttgttggcattttgtgtcactgaaagcttgcttctctgtttaaaagaaacagaactcttttcctattcattttcttggtgtttaaagccatggctgaaaactttccctgcagaaaagacctcatgtttgagggttctgaagaagctgtctttgtagcatccattctgggaagatagactccctgtgggcagcagaccaggttagtctccaacttgtggctattctcctgcctcaaatgccatcatgcctagctacttaagccatccccctttccacaaacacagggtccttatgcatgccaggcaagtgctctaccactgagatacatcaccagctaagatatgccccacagttcctctcattcttctctgctctcttctgcttggttggcacgcaaactgctgtttttacaacagcctgtgattgtgaaatctgggcttctctacctcaggcacaatgttacaaagaacttcttggttgatctctcacagaccctatatgagccgtgggctattctggccaactgggaatacctcgtgccttaagtctaagtaagcaatgggtctctgatggacaccagccatgtgcttcaccctgtgctaagctcagccaagtggccaagagacatgggatttatgaccccatcccaagagcttgaggattattggagtgtgggggagggagtaaaaggctgatgtagaagggagtccgagttcacagagagaattaagcaactatgttaatgatattttctaacatcgaaaaaaaatatgtaatgactaaattaagtgctcagctttagcctaaagaaaattaggtttatttatggagtaataaaggaggaagtaacctgtgcctcctgcatccctccctcagtccccaggacatgatgcgtatcctctcaagccacacatgtcccctctgcgggacacaggaggtgtgggactgtctattgctggaagtctgtttaggctcatctgttctggatagttgagggtggggaggcaaggagttagagggagctggcatctcttgagtgtcacttgcctaggttggatatggtgctgcatgcagccacccaccccctgggctgtttcaaatcccagtaaccctactctcctcccccagagcttgtccatcagcaccacatacctctgagacatctactctaaggctgtgtccttattgcctcagtgacttctatgtccactctgggaacttgggtagactgtagagagggaatggttgcttcttaccattctgttctatgttgcttagggcactggagcacatgccattatacccctgtgctcaaaactgtcatcatagacatgatatcctggggctgaggactcccaccctggcccaggggtcccctggatcaagtggttgtagatagttgtttcttaggagtagaacactgggctggagagatggctcagccattaaaggctaggctcacaaccaacaatataggagtgaaacaccttcacggccatgtagatgggagcagatttatctgtgactcgttgtgcattctaaatgaaaagggcattagaatttcaagctcagtctttggatgggctgctctagtatcagaagtaaagctatccataaactgtgttgtacaggtagctcctctccccattcttaggttaagagctcatttcagggttaagggaaaggagaaacaaaatataaacagagtatgttcagagcacatccctgcgcccaggtctgcagtctctaatctagaacttagggagcatagtgagcagtgtatagagtagcacatattttgggcaaggtgtgagttacaaaggatcttgggaaagtggaggtctggctgtatgtggagctgagagctgggttggtaatgtcgttgagccatgaattgtgaccatacacacctattggaggaagagaaaaaagagattggccaggtggacaccagagtccgttgtccaagtagtccctcagggactgtctgaatagatgcttgagtggtagaaggacccagatgttctctagaatgaacatcaggaggccctacaggactgagcgcattgaagggtggtagcctgtttctcctctgccttcagagttgaaccatttctcctcctcatgagtgggtggcttgtctctgctggcctgtggacttccagccctgggtatggtctgtctcactccaggtctggtttgtatgattagatcccggggtacgaaactcatggtgtgagcccggtcaaacagtggccctgacccagcttctttggctagtgtgccagtcctgacttctgaggtaatgttcaggggctctggggacagtgcagtataagatggacagctttggtagaggctgggagggaatcactgtaggtaggggacaagtggcgcccgaggagccagccctgagcatttgaaaaagcatcagagaaacgtgagctaagctctttcaaagatggaggttctgcagagttgagctctctatcctcttcattgtcactgacctgcccctcctcttggtgtccaccttcccacttccaaggccagtactaagatttgagggcgtttccccataaacaagttttggaaacttcaaccccaatgccgccatcttaggaaatagagtaccagggggagatggttgggtcatgggggctccacagttatgcactgagctaggacctatgagtttggtctcttgctctctggcactctgggaatgtgctaaggccattcttcgtagccagcatcatgatcagagccttctcaactcccaggacaatgaaccaagacatgtctgcccatttcacgttacccagtctcaggtcttctgttacagcaacacacacaccatacataaaatgtccagaagacaacttgtgtccataccctcctcatcaaattgtctaaaaaggagcaagcatcagggtttggcgtagtcatgtagttgtgtggttgaaagtcacattttcttgttttaggcagggtctcagaacagctgctttgaaatgcaattggagttgttcttggtaagggaaggccataggacaggggatttatgatttaaccacacatatcttcttggtgagccaccaccatgctaactccagtagcagcctggtgactgagctggtttggggtaactaggtcagagagcctggatacttccccagctttcagacttagctccattccctgagaggcacgagccccatgtgctggggactttttttctgctgctgtttaatggctgtggagccaggattgagaggaagaggagaagcagggacatcttcaggataggatagtagggtgtgacctctgcagctcagatgtgagggctgaccagctttcttatgaatctcttaaaggggaaagagggagctgtggacagtagcattaaccaacagcctttgtcttgtcaaagctcttggtggatcagttcactagcttcccagaaagatgacctgtggtctcttgtctggctcactcttatgtacttggcagctgaggctgtgggctggtatgagctgtcggagtctgccttgcacagtgttgaagcagggtttcacctagctttccaactacccagcttgtgctacaagatgctatctgcatttccttgtatcatatatttccgatttgaggaagggcccatctgatgacattgagccttaggcctaagcaaagaatatacccttcttcttggaggcagcagagttcaagagtcttccagggccagcctcttcaccttctccagcatacatatgcatgcacacaagcatacttatacagtgatagccctgcttcaccttcttcccacccctcccccacatctgtctcttgtcttctttcaggatggacatgagtctaccagacagctattatggaaacccagagaatgaacctcctcttagctgtgtatttgtgtctcttcaaggtacctgtagagacgcagcaacttatcctaatgtaaggtggggcctagcctgaactggctatccctgtgcctacagggaaggcgttgggagagacctgtgtgtgatggtgtgcagtggtctaattctgctttggagacttggccttgagaactccctgaagaatgactacaatagtttcctttcagaagggaacccctgcagccttgaccttggggagggaagattctcagcctcagcaaccaagctgctgactgtcggataaaggtattggtgggtcaggacctgcctataggaaagtgctggtgtttgctgccttttttttttcatgggccactgagagaggaaagagaggtgtcgaggtaagtcaggagcaagtctgtatggagggagctttgggaattcgtccccgagttgattacctcatccatggagctaattctgtatgggagagcctgtgtgcgggaacccccaagggaagcagccccatgtggattagcaccttgcattgggtgcttgttgggacgagcccccacatgggacagcttctctgtaaaccagcctctacatgtattagttcctgcatggaggagcctgtttgggtgtatgggagagctcctgagtgagtgagcctcattgtaaaagagcccctatgtaggttagtcctggtgtaggggagcccctctatgtggtggctgttgtagggaggagcccctgtatgtggaaggccctgcattggagagctctttgattagggacactgaaagcatcagctccagtacgaagctcccatatggatcacctcctctgtgtggaagaaccctgtgaggtactaccgtctaaaggattatcttcactgaggagcccctgtgtgaaccccggtctcctccctggaggtgggagcaggaatctcccagacacactggggacaagtgagataatgggatggcggtcttgtcagactatccctacctcatgtgggtgactgaaggacttggatagtgagtagagtgatgacagggaagaccactctgagggcagccatccgaggctcttacaggacccaggacccatgcccacaacaccaaggggaaggaaccccagcactgacacaggtcgaagcaaatgagccagtgggttcacaggaggggatagaaggtcgtggatggcacactggcctgggataagaacagttctggtcagtgtgggggacgcatatgcacactactccaaacgatggagcctttctctgccttggtcctcccagcgactggccactgcttgcagcacagcagctcctctctaccccagcgccccagcagcactgtcgagcacctctttcaggctggctgctaggctaggtactggccatacagtacttggtgtgcctagggctaccatggtgttagcgatgagagtaacagtcaaaagacttccctctgcaccgtgtgttgtgacagacactcttcagggaagaagggtccattgtggctgtttgggatgggatgtgggtgactttgatgggtgactccctaacaggcacatgttagcagggtgttgaccctgtgtgctttatgtagctcctatatcctcaaccccaccttagcggcaccacccttgaccccatcctcaggtaaggacacttgagtccccagagagttctgtgtaggctcagagagatggagatggctgttgatgttctcagatgggccacgtcctaagtaaacatcagcctggctgtgttgacccctggtgcttttctccccttagactctgttatgaaagaaaattgaaaaagagccttattgtgccttaaaggctttttaattaaatataactcatttaatttaaacaactttaagttccatttttttaatataagtgttagggtggtgtagtgaaaatgccttctatttaaagtgtgggggaagcgggcttctcccaagcctatgcggaaacccaggggagcaagctcaccccagtgatttatttagacagcagtctaaactcatcaagtctggacagaagacaggcgaggataatgctcccaggatgagatgggaggcaggcgaggaagatgcccccaggatgagatgggaggcaatgttcctctgggctgaatgaagaggcatggggagggctcggccagctggaaacagttcactgctagtgatgcattgttaccttgtatttctgagcaccatgagtcctccacttcctccacccacagtgtggtctgggtaccataaatacaggaccagagtgagagaggatcctgggagggaagcttggctggtggacaggaggagggacagcaatccaggagcaaatgcatgggatactcggctggagtccatctttcttgcaacactgtcctggtgtgaggacctccttgcctaccttgtctgaaatagtactcctccaaccatcctccaccccctgtgcctgggtagtgcccctcccttttaaactatgctacttctcatcatagggtggtttgttccctttgtttcttggttgcccgtttgtgcatgaggttatgatcttcatgggactgtggccgtggctctcctggtaccgctgtatctaaataaacaaatgtatgtatgaaggaatgcatgcatgcatgcatgcatgaatggatgaaaatgaatatactctcatgaaggaatagctgcttagggaactcaccaggcacgctggctgctgagagccctgctgagagctggtatcctagagttactgggaaaatgggagggcagggaagtgagaagtagggctgtacctcagaaaacagacaccccagtttcagcgccaagtcatgcatccatcctgcacggtggcgtacacctgtgatcctagcactctggaggggaggctggaggatcagcagttcaaggtcatccttggatatagtgcatttgatgccagcctgggctatatgagaccctatctcaaaatgacaagaaagaataggtggaggagaaatccaggaggctggaggtgaccctagccaaggaggacggcgggaagcagacttgtttctgagcaagacagtagtttctggttagaatccccccacttatacatcagccacttcagatgctcctagctttctcctgccctctcagataccactcttgcctagctgtggtctgcagccaccctcttcctgctggctcactctcttacaggctttatccagttccatccagcacccccacttaccagttggactgaacaatttgtatctatgtcagatcatctatataaaggtgacctctcactccatgtacaaaaacaagaatagaaaataaagtcaagcccgaggacacccccccccccaccctgtgcatccctctttcttttaattcccaggcacaggttgttctaagcctcatcttgagcttttcatgggcagagaaaaacagtggcagatgagaacatcccgttgcacagtttggtgctgttaggtcaactgttggacggtccctagcaggcgtcctaaatgagtagttaaaacttaaatgcagtcctctccttcctggacagctgcccttactttctgccctctgccccagatgtctcaattcttcagtagagcttatacttctggtgggacaaggcctggcaggggaggggtggtattggttgctttgttgcttggtgggtagagaacttttcaaataggtttgaaactcagatggaagactgcttccctagtgtgcatgaagctctgggttcgatcctttgcaccacacaaatctggtccatacctatgaccccagcactccagaggtggaggtgggaggatcagaagttcaaaattatgcatagttacataacgggtttgaggctaggctggcctatgtgagaccatatctcaaaacaaaacaagcaaaaacaaaaaacttctcggagtgggcaatatttaatataaggtctctctgtgattttgtgggaacaggtctgtttttttttaaaaaaaggaatagtcaagagtttgtcccacaagtccagtggacaattcacttaacaagttcttagtataatttgattctctaatgaaaatggtgtgtttgaatccctggatctcacactgaggatagaagatctgtggaccacaggatgggcagatgctgtctatagcttggcacaggcgtggctgtgtgaggtgagagagtctgcacaggttctgctgccagtgtctcagcccgcctgcctcgtacttgtggaaatgacatttgagcgatggcggtcccttgggttgctgtgttacagcctcaggctgtggactgttatgatagtcttgtgcacagtgattgcttcttctagggagacatgggctactcttcccgtcagaatgatcattaggttttaatttgttgggttgtcagagagatacaggtatcaagtgcctgtcggccctctccgtgatccttcaggagtactgttcagccctgattgctgagagggtggagtgatggattggagagcctatcgatcgcagacagttcaggttagtggtttctgtgctgtagctgaggtggctctgcctttgctgtggaagatggtctctcatgtagaactagcctctcttcttaaagtgaaagcaaaaacattactgaataaagctttatggatatctacaagttaaaatcacagaatctttctattctatcatctaatatgtgtgtgtgcctgcctatttattattatctatttatctatctatgccatccatctatccatccatccatacccatccatccatccatccatccatccatccatccatccatccatccatctatgtctgcctgcctatctatctatctatctatctatctatctatctatctatctatctatctatctttcctgtgagcctgaggaagttagggcctcacacatgctaggcatatgggttaccagagtcccactgttgttattctcttgagacatgtctttttacataaccctggctatcctgaaacttgctgtgtagactagacttaccttcaactcatagagatctcctgtctcagcctcctgagtgctgggattaaaggcacacactacttactacacctggcttagtttttgagatacactcttcctaggttgcttaggctgacctcaaactcaactgcatgaggctcagccccaacctccacaccacagaaagtatgctcatgtgtatgtggatgcatgtggaaatccatacatgtgcatgaagagaccataggttgatgtcaagtatgtcacttaaccactctcatcttgtgttgagtcagggtctctcatttgaacccagagctcactgacttggctaggctagccagcctgatcctctatctcggctgcccatgtgccgggattatagactggctgccatgctcgcccagcactggatctgatctctggtccttacactcgcacactttacccactgcgccatctcctcagccctctgctacttttgaatgagaaagcagcatccagatcacctttcccccagaggcctgacagctgcccatgttccctttctttctgattctggaaacatcacagatcacactctctttagcgtgacatcttcccctttccctgatcagtcagaaatctctcaacagaacgtctccagagtttgccgtcgtttctgaaatttctcccacttttatcttggctgggcagtgtctcccattgaacagaaaaggaaatgggatcaagagtcatctgggtggctccctcaggagcgcagccaacatagcagctgctaatcaaatcagatctctgacccatcagagactttggtggcccaagtaactgcccagttgtttttttttttaatcgagctagcaaaattgatattcccaggtgtgcagtctggaatgctattcatgggcttatcactttaataatttttaatagtaaagtcagaaaattacctcaccagtaaagagactactttgatttaaaaaaaaaaaatcaggactggagagatggctcattggttaagagcaccgactgttcttccagaggtcctgagttcaattcccagtaaccgcatggtggctcacaaccatctgtaataagattggccctcctctggtatgtctgaagatagctacagtgtacttatatataataaataaatctttaaaaaaatcagatggacatgattttgggggggggggtaagggggtgaatgagtagagggtttcatgtagcccaggatggcctcaaactctctatatagctaagaaggaccctgagctcctgcttccctcttctctacctcccaagtgctgggactgtggtcactcaccatcacagccagcttacgtggtgctggggatggaacctggaattgagctacttctctctcccactgtctccctgtgtctgtctgtgtgtctctgcccccatccccgcacgctgtgtgtgtgtgtgtgtgtgtgtgtgtgtgtgtgtgtgtgaagcctcccttcaaattctctggcttagttattttagcctttccactgttttgtgaactcaggtttctttacataggtctacttgtcgttagacaggaactagaaggtgcacagaatttgttcaccttcctacttgtgttttagctaagtgtaatcccactttctctgtccatgtagacaggctcagcttttcccctttggtccttgcgctcctgtggtagtatgtaagcaagacagggctcatcagcccaggcagcctgtgggcagggttgatggacaggtgccaggaccaatgatgtgagtcaaaactccctcagctaccccagcatcttcatgtctcttccacgggccagcttcacctttccattttgacctgactttaaggcggggccacaggaattcccacaaggctccctaactccagagagcccctgtgaccctgttccttgtgaagaagaaggtgagctctgaatcctcccctcactgatatctcagttgccccatggcttggcacttctttggatacttgagtaggctctatatgagtggagaaggcaggagacgtccactttctctcttagaaaaaaagtcctcatatactcatctatatgtctgtctgtctgtgctgggtagttttatgtcagttttatacaagctgaagtcatctgagagaaggaacaccagttaagaaaatgccttcataagatcgggctgcaggcaagtctgtaaggtacttgcttaattagtgattgatgggggagggttcagcccatgtaggtggggccatacctgggctggtggtcctgagttttataagaaagcgggttgagtaagcctcatgaagaaagccagtacatagtacccttctgtggcttctggattagctcctgtctccaggttcctgccatgtttgagtttctgccctcattgcttttgatgatgaactgttacatggaactgtgagtaaaagaaatcctttcttccccgttggtcatggtttctcatcacagcaataggaaccccaagattgactctctctatctgtctgtctatctgtctgtctatctgtctgtctatctgtccgtctatctatctatctatctatctatctatctatctatctatctatctatctatttcccttgccttgctccctccatcccttcctgcctctctccttccctctcccctccctctctctgtttcatgtttacctccttccccatcatctctatccctacccatcttcttgcctattatctacttacctacatattatgtctgtctgcctattttctagttagctacttaccaacttatctacctattatctaattacctatctatccatctattatttctatagctccttacctattatctatctgtctgtctatctatctagtctgcctgtctgctgtctgtctgtctgtctgtctgtctgtctatccatctagtctgcctgtctgtctgtctgtctagcacattgtgtgtgtgtgtgtgtgtcacatgtgtgtgagcatgcaggccagtcacatgtcttcctctatcactcttcaccttatttcctgagataggctttctctctgaacctggagttcaccatctcagctagactggctggccagtgagacaccatgttcacctgtctgcaacccaccagtgctgagattaaagatacatatcaccatacctgcctttaagatggctgtcatggctttggacccaggtccttatgcttgttcagccagcttatgccccactaaggcatcttctcagccgctcccgccttcttgattctttagcttggctctcaagctaatctccagtttagagataactttccaaccttctctatcacctggctctgaagcttcagacacacgtgctgggaagcctcccagtgcaatggctttccttctgcctgtagttcagccacccagaggagagagatcctacaaaatgcttgtgcctgctcagtgagtgggagccagtcttggaacacacgccacacaagacactgctttatttagctgtctgctgtcagtccaggaggagattttaattgcagaatggtgtcttgctagtgaaaaatgaaagaggttggagtggagtttttaaaattcaaatgaatctgtggaggaggtgcaaggatgcttgctaacgcagcctcggttttcagagcatctctgttaggagaaactggatgttggagtctcatcagcgaaagggctgtctgtctcctctagacatggtggttcagaaactgagaaagtaagtttccttttgtagtatcctctggaagttaaggtctgagcaaagataatgccagaagcttcctcagtccctctgtggctgggtagaggagctgtcatgggagacagcatcagaacatggacactgggacccttgaagtagcagcctgtccatgacagactaccctctactaatctgcatatgctggccagtgggctccagctggcctcccagaacagcactttttagttgaaagttcttgtcatatccacatagtctacattttctcagaaatcattgcatcccgtaatactctttcctctaactaggcatggttggaaacatggccagggactcacaactatcgtcagaggaaggcgctacctgccttctcctgagaattggaggtactttgttcaaacactatagacagccctcaaactctgcctgcctgcctgtctgtctgtctgtctgtctgtctctctctctctccctctctctctctccctcccccccctctctctctctcgtatcagggaacttctagattaggaaaaatattactcagcactcacattatattgatttaaaaataaagattatgctgttcaactgcacagtaaaactacagctttttgaaatggtaatttctttttacttaagctcttctacattatagtggagataatggattcaggaaggtacaacgaggaataaagccgttgtattgtattggttaaatgacatttagaatgatttggctgtcagattcatagaaaggttatgaacagtgaatgaaaaatctaaaattaattccctacttcaagaaagtgtgatttataccacaataaaattagatttttagttaaagaaatttagtcattaagaaaggcccgtgtgctcactctcatttataaccatctggcttgatgctttccgcagaaaaccatttcttcccttgctgaggcatccagggcccccagtgtcacacgcatcgacggattgacttctgtatgtttcctcgcttctaggggttgttctctcaaggactggaaagacagaacctgatttaccctctatcatcagaaaggcattgaacttctctgcttcttcaaaatggtcttttctgtacttctgggttattttcagtcacggtcaagactaactttggagacctctgtgccaaatacccactaagcaaggctcagactcactatcatttgcttcaacactagtctatgggaatgttctgtccctgcctagatttcatagatacataaactgaagcctagtaaacttaaatgatttaatgaaggagacatgtgtgcgtttggggggggggcatctggtagggacaagcttggagccatctgatgtcaaagcacagctcttcacttgtatcatattttcagcagcatttgtgggttacttattttgctaactcagtggtgtggtatttcagatgctggtgtggagctctgcctgggccacttccttcatgcgtgctcatcaacagagcatagtcttcttctcggtagaactgacattgagaatactctagactgggttatccgtaaagaacagagatttgcatcatccagttctggagacagatatccaagaacatggcaccaatatctcgagtgagcttttgtgctatatcaaagaatggtagacggcatcacacagtaaagacacgcacacgtatgtccaccagagagaaactcaacccgagttattctttatctagggatccattccaggaataactagtctgtccctctgacaacacccttagtccgtgacttcctcaccccaaggttccagctgttcaccctgttagaggggtaattaagtttcaatctgttttggaagggacatacaaagagttttcctcctcttctgtcttagatactgtataatttagagattgaactttttttccctcagttcagcaaacctcccatgtgtactctgtgtaatgtcttatatttttaatttcaacactcggatatcagatatatagcagagtgtacatttcctgagtgaagaactcaattaattatgacaaagtaaacaggtctgcgtgactggcaccaaaaacatgacatggaacattctgagcaccccagaaccacccccagtccccgggtccctctcatcccccccccaaaggttaccactaatcaccagatgacttgtttctagaattcaaaggatacatactgttaccatcttacaattgccctcttccttccttcacccttggctcccgaggcttacccagatctttctagtatgcagaagtctgttcttacgcattgctgtcaggtttccattgggaaattgtgccatggtttttggttatcacacaacaagctgcgagccacaataaacttgccttttggtctttatacgcacatacttcctgttctttctctccagcccccatttatttttttaaatgtaagactctgaaatccttttctgtgcttaatctagttcatcccctcttgaacttcttggtatgaaggagttgtgaacttgaagagttattatgatcactaattgtcctgtatgcccttttctttactgaaattttatgtacagcatatttggatgatttttcccttcccctaggccttcctcacctccctacctaaccagctttatattctctctctacatctttccctcaaaaccaaacaacaccacccccaaacaaagctcaaaacaaataaccccgataaatccacaagtaccaaaacaaagccaagcaaaaagctcaccaaagtttgttttgtgttcttgttgtgttgcgtgccttggtgtgggcttgtcttggagtgtggtcaatagccccagggcactctactgtggaaaactgattttgcttttgccaacaggtatcaaccgcaaatagcttcttggttaggggtgagccttggtgtcaacttcccttgtcagtgctaagacactgtctgacttgaacctgtgggtcttgtgtgtactgtcatagtctttgcaagctcatgtgtgcgttagtcctgctgtggctggaagacggtttctatggagtcatctattgccactggctctcacactctttccacctgttctgctggacagctggctacctttgagtggaattggtaagtcagaagatgtcacaataattgtgaattttataaaatatttacagcaaacagatttctgtgaatttgagctagcctggtttatagagagataccctgtctccaaaataagacaaaacaagacaaaataaccaactaaccaaaacaaaagcacaaaaccaaacaaacaaaaaaaccctcaaaaccaaaaagtaaagaactattcattaattattttgtttattttttagagacagagtctcatgtaccccagtctggctttagcccctctatataccagaagatggccttgaacttccaatcctttgcctctgcctgcccagtgctgagatatcacagaagtgtaccagcacacttcgtttattttcatggcactggatatggaatccagacctttgtaaaatgtttagccaagcactcagccaaccaagctgcatcccagatccaaaatatgtcatttaatggaatttaatacagagaattgcattaaatagatgctacaggatttttaaaggcaataaaagacacgctgtgataaacatacctgaaggacacaggcttcgttcctggagaggaacacacacacagctagacctttgactagggaaggcaaccctgctgttgttggaacatgacagccactccagacctgtgcagacatttggcattttaaaacagctttaaataaagaggcacattgtcgactctgtgagtcgtagtcctattcccttgtttaacaatgtgctagtcacatcctttgctcatttttcagttgggctgtttgtatgcttcctatctacagagatactttatacatagagagtcagagagatacacaccaaaagatctcctacaagccacctgcatctgcttaaccacttctcagtatcacattctgctaaaatgctcagtgtgaggcctggggctcgctcagcttggctgccaggaagcttgcctggcctctgggaagcctcggcttcaatctccagcaacatagaaaccaagcatggtggctcatacctgcagtctcagcactggattagaagttcagagtcaccctccacattgagttgcagcttctacatcttttaccatctctgtggaacctattaatcaccaaatgtctgttttgatcaagtctaagatatcagtcttctcctctcgataggctcttttataaccctctgcagacttgtccaccctctcatggtcaccaagacgcagcttgaaaccacccagggtttccatttcatgactccctcccccgagacccactgtccatctggaactgacctctccctgtgtgttgtggggctagaggttgaggttttctgccatgtggacatccaattgatctaccgccatcagctgcaaagacaattgttccttattgtgttactaagacaccggaaatggaaggtgtgtgatttgttagcgtctctacacctccttcttgctttgatttgctttcttagggatttatcaaactattaatctttccaaagaaccaactttttcatggtgcaattttcttccctattgtattgatttctgctcctgtcatatttctctcgttctaccctttgtggacttaaattgttatttttctagtttgtaaagataaatgcttaggtcattcatttccagtcttttaaaaaaatgtccttcaagcatacatttgaggctatcattttcctctcgactgatatatcccacttggtttctttttagtgttacggaccaaattcaaggccccatgcttcttaggaaagcactagccactgggctgacctatatcccacacttgtgaaaatgttgtaattcaattcttactctgctctgaagagtttgcttcttatgtgattcttcccttcgagagatatgctttgggagctgtgtgatatgctatggatatgtgatatgctttgatatctatgggccaaatgtttgtggaaatttgtctccctgtctttgtttctggcttctactttaaagtcactatagtcagaaagttacatgtgctctcagtgtggttcctgtgatttgaaaattgctgagggctcagtgagttttaataaacgatctatgcagaatgtgttgggctcagtttttgggggcagtggttatgtgtaccatgaagtcgggcttctttatcgtggtgttcagctcttctgtacactgtacacacatctctctctctttctctgtgtctgtctctttgtttctgtgtctctgtctctctctctctgtttctctccctgtgtgtgttgtatgtgcacatgtatatattaagttgcatgcactggccagaggagggtgtcaggtatcttgctctataactcttactccttgagacagggtctctcactgagcctagagtgagggtagaagcaagttggcccaatggccgtccgtccccaccacctacagagctatggttatgaacttgcagccacctgtttttgtacatgggtgctgggattcaaagccagtcttcatgtctgtgcagcaagcctacttccccactgagccacctctccagcctcccttctgattttccctcggttagttctactattaatagagatttcttaaatctaatcactattgtatcctaaaacatgtctttttctagttctttcagctttcatttgtgtgtgtgcttttaggttatactattaggtgtatatattaggaactatcgtttttatcactaatactagttcttgctttagagtctatttttctacatccagttttatttggttggaaccgtggtatatctgtttttaaacatgtttatagtcaagctttttataggctggtagttttcacgtatctcttctaagtggcatgcagttagaggtgggttttgtttgctccgttttgttccttgtttcttcccactcttgtcttagttaggagcagacacttattgttccctcccattggcctcatggtgttatagttccagggaaggcccattatgggaagctacttgctcctagctaaaagaagaaaccctacctctgggtaaagacttaactccatttgcctggccaccatctgcctaaggggcttctcctcgggaaggctgatccccctcaaggcatactaaggaggcagtaggaataattatttctttaatgagataatgtaccttaccttacaagaaaccctactgagcattcacttagggagtgggaaccatgtagctgggccaagcctaagcaagtagctgagttactgagaaaagggtaacttttttttcttcattttatctatgtatgtcttttttttttttttttttactagatttttgtttattgagacaagatctcattcattaggtttggttggcagggtgtttttcccactgaggcaccttgtcagctcaacaaacactttttcttatatatattttttattacgtattttcctcatttacatttccaatgctatcccaaaagtcccccataccctcccccccactcccctacccacccactcccactttttggccctggcgttcccctgtactggggcatatcaagtttgcatgtccaatgggcctctctttccagtgatggccgactaggccatcttttgatacaaatgcagctagagtcaagagctccggggtactggttagttcataatgttgttccacctatagggttgcagatccttttagctccttgggtactttctctagctcctccattgggggccctgtgatccatccaagaatttccagggcctcggcatgctttcccagacactctgggttttctgactttctctgaagcacacccccttgccatttgctgtttgcctaacatgcacatttgctgaccttagtgcccaactcaaaaggcatggctctcttgcttctcttctctgtcttcctcctgctggcacctgatgtatttaaattctaaaacaaaaagtctcctcaggctttcttccaagtctattctttaacattcacaagaggggagtccagctttcctagaaatatggtgcccaatgtgggacttctcaaaatttccagtaacaaagacatttctattttaaatctttttgggggtgggagggcagataattctaggatagtccaactattctatttcatttgatcttctgctttagtgatcatattctcatgtaagttagctttaccctataaatcattaatgttaaacagtattttaaaagatatctataccctttaatcctttatgacacttcttattcttccttgcatgactatatatttagttcaacaatttccttttgtttacatttttttttcatattgctatagtgaatgtatactattttctcttaaattttgtttgcctaacaggtctttatttcaccttcacttggtttgccatattactatctgaattttttaaaaatttattttaaattttatatgcttctgtctttttgtctctgtctctgtctctctctctcttatatacacatgcacacacatacaggcacacaagtgatgcaggtcagatgctggccttggattccctggagctggagttacaggtggttgcgagccacccgacaaagatgcttggagctaaactctagtcttctgcaagagcagtatgagctcctaactaatgagctgttttgtgagttccaatccctatttctcctcaggatgtagaattccaaggtttaaagtctggtttgttaccacactttaaagacagcattccattgtcttaggttccactgtctcctcagaagtagacatcaccctcacgctgtttttctgtagatgctctctggccagtcttaagactcctcttgctcttcctcctccccctcctcccccttcctcctcctctttttcctcctcctgcttttttccctcctccgcctgctcctctcatagccattcatctgtttatctttgttaaacgagggatgggtttctttgtggttagagtttgtagaggtctcaaatttctggcttgctgtcattcattaattaaaagaaaatttgcagtctgtctatcttcaaataccaattctgctcattcttcctcgaatcccaattacacccatgtttgacctttttgctgggttatgtgtctctaacgcacacatcattttaattcttgtgtttttcatcacagctcttcagtctgattgttttttactgacctacctctcaacgaactatttcttcttgttggctgttaaatctgtttaattctttcagttatttaattttcagttcagaatgtccacttggttcttttaatagattttagttttatgctgaaaggtaaaacctttttctattttttcaacattttatccatattcttttaaaaaatgtttaaatttattcttctctcatatattatgtccctactgtaatttcccttctctcttctcctctcagttcctcgccccatccattcctctttcatatccttttagaaaagggtggacctcctatggatatcatggcctagtaaatttcagtaaaactaggcacctcccctcatattaaggctggatgaggcaatccagtaggaagaaagaagtcccaaaagcaggcaacagagacagagacagctcctgctcccactgtgtgggaccacacaacaaccaagctatacaactgtaacatatgtgcaaagggcctgggttagacccatacaggtccatggttgttggctcagtctctgtgagcccctatgggcccaggttagttggttctgtgggagttcttgtattttagccatattctaaagcctgtatctgctgatgtagaatgtagataaccagtgggtctgcttgggtaacctgaggtctcttcccttggatttgagttatttaatgctgtctcttgtcatgcttggtgattttggactggatgctggagagtatgtgtgaggagccttagggataactcttttagctttcttgggttactagtttgttttgtttgggtttttttctttgggcacagagaatgcttgcaggtcatcttagactattcaagtacacgggttatttgagaatattataaaacctgttcatgaaccaaggacattctttctcagttaacttctgtctccctgttattgtgttaccatcaaaatctgtacttagattttattgaggcttgtttaaaactacttttcagtttttaaagccgggactgtactcttcctttttttcttggcctctggccctgtatagtccagcttagtcactttgacctcacctcagggaagttttgcacacactagtgtgctcttttctttccagatcccttttgcaggattaaaaagaaaagtttaaacaatatttttatgatgcaggtatgctggttggttttcattgtcaacaggacataaactagattcacctgggaagatggacctcaactgagaaattgccttcatcagattggcctccagccatgtctgtaagacattttcctgattgctaattgaagcagagggtcccagctcactgtgggagatggcactcctaggcaggtggtcctgggttgctgagtacaggaaggcagcctaaggtgaacctggaagccaggcagtccatgtcattcctccataacctctgcttcagctcctgctccagcttcctgcctcaagctcctacccagacttctctcagtgaagaactgttgtctggtctagtttcattcttctgcacgtggaaatctgctttcacccaacactatttgttaaagacatatttttgccacaataatagttttgtcacctttgccaagaaccagatgttgatagctggctggtctctctctctgtgttgttgttattgttgtttttattttgttttcattccataccattggtacatgtgcccgtttttgtgccaacaccatcctgggttttaatttttttttaattgtgtttctgtagtataatttgaaattgtatttaataactcctctagcctgttggtttgtggtggtagtggtgtgtgtgtgtttctcttaatcactttggttattttgtatcttttgtgcttctttatgaaacttaagattgtcttgaaatatatcattagagttttgataggacatgcactaagtttatggatggcatttggtaatatgaccatgttaacagtattgattctgctggcccatggatgagtatgggtggtcttcctatctcgtacatctttctgtcttccaaggtcttcactttcatccatattttatcatttctctttgacagatctctcacctccttggttggatttatttctgaaaaatcttgttatttttcagacttttatgaaagtgattgttttagaatgtctttcattgttggtgtatttaagagctactgattttgtatgttaatttcgcatcaagctacttcactgaatttgattagcaagtctaagaggtcttagtggtgtctttaaggtcttgtaagtattagatcagattgcttgcaaatggggatgagttgacatcttctctttctgctttttctatttttcttgcctcattgttcaagctgaaatacctagtactaaaaggagtagattaaataatcatagtgagtgtgtggactatttagtttctgattttagagatatgatttttggttttgtttgttttctattttttgagacagtgtttctctgtatggccctggctgtcctgaaactcactctgtagagctagcttgtttcaaactcagtgatctgcctgcttttgactccaagtgatgggattaaaggtatgtaccattactgcctagactagggaaatattttacatttatcactattcaatatggtgttggttgtaggttagttatatatgttccttccctggtataggcatgatccatctctacctagtttcttgaaggtatgttgaattttgtcaagggattttttttcctgaatctattgagttggtcacatgatttttatttttgattaattttacatgtattgatttacctatgttgaaccatcctgatgttccaagaataactagattttgagctgtgatatttttaacatgttgttgaatttgggttgtatgtacttggtgagaatttgtgtgtgtgttcatcaatgatgttggtttgtagttttagtttgggttttgatcatatccaatttgagtattgaggtaatattcgtttcacagaatgaatttgaaaacagtcataccctttctattttatgaaataattcaataaacagtgtcattacttttcaaatggctgtcacattcagcaaacactggttttcattgttcaaaaactttatttttatataatctcatttcttttttttatttttttaaagattttttttagtatgtgtatatgagtacattggtgatatgtgtgtatgctcatatacaacatatgttcatgattcctgctggggtcaaaagaaggtattgagtcccttggagctagagtaacagatgttcatgagcacccagtgggtgctgggaacccaacccgggtcttctgcaaaactgacaaatgctgttaaatactgtccacctgtccagcctctttgctagagttttttatttcccctttgtttaattttggtaggcaatgtataaaaaaatcattttatctaatatgccactttattagagcataagttttcaaaataatccctaatgcttcctgaattttggtggtgtttgttgcagtatctcctttttgacccccagaaaatccagtcttctttacctttcctttgggtttgtcaatgctgtttatctttgaagaacaaaggtactcagagggtttttctttttcatttaggcattcttaaatgatgtgaacttacttcttagaatggccttcattgtattcactgattttgacatatttctattttcattagaatctagaaaaaaattatcttccttaatttcttcaatgtcctactgattggtcatctcaaagcctctgtatatgttatgtgtgtgtgtatgtcacatatgtgtgtatatatatatatatgtatatgcatatgtatatatacatttatatgtataaatctgttatatatactatatgtatatatagtaatttctctggtggctgagatctagaattatcctattatctcataaggcacaagattttttttccatttttttgtatttaaatcttattttaatgactgatgaagtgtctaaactttttacacagccacatgacattgcactgtacaaagctcatgttcaaggatgagcaatcaggttacaaaaagcttcaaaaatgtctcctaatgtctcagtaagcttatgattccatgttgggacacattcatatacttgtgtgtatatgttgcacatggcccatgaacttcagtctggacctgctggctgtggaatatgatctgttttgaagaaagtcccatgtgctactgaaagaaggtatattttgtaagtgctggatagagcattctatagatgtctgctaagtctattgatatatagtgaatcaactctggcgttttcattgttgattactagtttgaatgacttatcactggtgagagaagagatctgaagttacccactactagtgtatagatgtctatctagtcctttttgtttgatattacttgtgtcctataatttggtgtaccaatattcagggcatataaatatttataatcagtattctttcttgatatctgctttactaattttggcttggagtgttctttatttgatggaagcgtaggaattgctgctctcctccagattccatttgtttaggatgtcatttcccatccttttactgtctatctgtgtctttgctagtgaagtgtgtttcttgcatccagcaaacaattgaatcttgtttttaaaaatctagatatctatttcatgtattttaatagaggtcacttatattcagagatataaagcaaaggtacatcctaattccttttctttgttatttttctgatgttggatttttttccccttaatgttagcttgctgatctctgcttctactagagtttactttctttctgtatgctaatggttagctttattctttctcatgtgtatatggaattctgttaagttttccctataacatcggcttatggattacaaattcctttatattataattatattggcacatctttatttcttgtttagctcagagaacaactttacattcctacagtaatgtagtttagaagttgttttctttcaggatttggtatacattggtccatgtgctcctgtccttaaaagtttgtgtttaaaaaaatctatagttattctgggtttacctgtgtagtgagttgtatttgtttcttattatttcttgtagttttcagtgtgcattcttcattgtgtagtctggtgtgtctgttctgtttctcaatacctcctacacctagatattcatatctttctcaagatttggggaaatatctgctattattttgtaaatatatctttgtatggctttttgtgagttccatatcactttataatatatcaaaaatcagtttggtcttttaatcatgtcataatttcttatatgcctgttcataagttattttattttctcttaatttgtttggatatcttcatttctcaactttgttttcaaaatcttaaatcctcttttctgcttaatctcatttactggctttgagtgagtttttttatttgactcagtgagctttccatttataagatttctgtttctcgccacctccctttattgagtgacccatagtattctacattgtattccttaatttttccagctgtttccatgcattttttcttggaatttatagatttttaaaagccattcttttgaattctttacctgtcatttcatctacttcagtatcttggtggttatttgttaaggaatatgactttggggataagtcatgttgccttcaccttccatgcttctatgatgagatttatgggactgttggtcatgaatgtcctctaattttgtattagagatgttttagagaatagccttctcttggtggtgtctttggacaccaacttgctgtgatgtgttgaatgtatttttatttggattttgtagtatagtttttctgttatttcttttgggaggattcatgtatctgggaccatgcacactacaccagagccttagcgtctgctttcttcacaggtgtgagagtgcagggcccttctactacatctggggagttactgttatggacactagagtttatggggtagactcagtactctatggcctatgaactctatgaactctaagtgttctggaaactacttttgctgcagggtcttattggtgtgactttctttatctctgctgtagcatataggtggatttccaggattgggtctttaggcttctcttagccatgcctacctggtcattgatgtagagtttttatctcgtgtattctttgagttgaagtatttgctgaagtgtgagcagaagtaggacgtttgtagagcaatatgccctgacactaagctaggttagccacattgggtcacaacagggacattgaccctgatagcatgccactctctgttgtgtgtttcagagaaaggggaagtgtggagataactgcttcccaaagcagcacacccaggcacagcctccttacagtggctctctgttacaacattttaacatcgagaatcacagaacacttctcaagtgttggcacaccactgcatagttcccacatcagctgaagccacactctccttcgctctgactctgcttctgtgccagatccccctgccctgtgtcctgtgccagccccacccctgtgtcccctctttcccattctttcctcttattcctttctccagcacacccctggactgctattggctcagcatcaatgcacatattctcacttgctccaataagaagactctgtaggtgtttcccagccttgtctgtccaatagtaaacttgagtgtgtctctcccatcagccactgcactgaggagatgtttacaagccactggcagcaaggaagagcttctaatcccccagcctggctccaccattagctttagagtaaagtttagggattttaatatcaaccagccactgaccaaaatgatagacgcaagacaagtttaatctcttctctcagtttaatcaataacagaaaaaatataagtgagaaaccttaaaacatcagataatctcacttccacctcacttttattgaaaattgaaacaagatctcactttatagctcggcctggagttctcaccccgatctcctccttcccatgagctaagatgactgatatgggccatactccaatctcttctgcttttatgtaaaccatatcaagctatggtaataggaaaacttatagatttattacaaaaaaagctagaagtcttttaatttttgaaatctatagttaccccaacctcactgatgaatataaatataaaatcgtagatggatcactataaaacatacttaaaaccacagaagactgtattcaaatcacattttaaaatatttacttatgctgagcatggtggtgcacgcctttaatcccagcattcgggaggcagaggcaggcggatttctgagttcaaggccagcctggtctacaaagtgagttccaggacagtcagagctatacagagaaaccctgtctcaaaaaaaaatttttatttttacttattttaattatatgtgcaagggtgtttacctatatgtatatgtgtgcaccacatgtagacagtgcccatcgaagccagaagagggcctccgattccctgggactggagttagacatggtttgtgattctctgtgtgagtgctggaactgaaccctgatcctctgaaaaggcagccagtgctcctaacagctgagccagctctctggcccccaagatcatggttttaaaagtacattatgagttagaaaagcttattccagaaagataataaaatctactttataagccatgctgttaataaagctaaggaaaaaaataattatctgcataaattcagaagtagcacttgataaaattcaaggcatatgtattttattttattttttattcaacaaatatgtatcaagcacctgttcttttacagtacccaggctgcaagagtggaacagatactggctccattccaaccctcacacaacaaagggaaacagtaaataatcgagtaaggggacacgcggctttacccagcgcattatttacgtgaaacccaatgaaatgtgtattgatcgcattagtgtagttaacatacctctgccaaagactcacttctccaatagggagacactgaagaatctctcttaggtgtcagaaacaagataaaagtactcactctgtctgcatcctattttcattttagcaggtcaggccagagtctcatgccataccttaggctgacctcaaacttgtggtgatcctcctgcctcaatctcccaagtcctggcattccaagaatgtgccactgttcccagcttgaagaatttaatatcaagttaagggagaagttaacaataagacaagagacagcagaactggcgttaaagacagaagacccttgtcacttgcaggtgaaaaaacccaccagtcaaagctgctttttattggttataaaaccacagcagctcctaaaagctgcaaaaaagaatcccaaaagaatcaatgagaactgccacaaacaataggaagttcagtcaagtggctggttttaacatcaatataagaattggttgctgggccagtgagatggctccgtgggtaaggtgcttagcagtaagcctgacagcctgagtcccatccccagatttacatcgtggaaggagagaagagactcctgcaagtccatctgtgaccaccacacatgcgctgtgctatgctttcatatatatatattatatgtaaatgtgtgtgtgtatgtgtgtgtatgtgtgtttgtgtgtgtgtgtgtgtgtatatatatatacacacatatatatacatatatatatacatctatacatctatacatctatctatctatatctctatctctatctctatctctatctctatctctatctctatctctatctctatctctatctctatctctatctatatctatatctatatctatatatgtatcacatgctaccatgtctaaattctcataggatctgaggacccaagctcaggtccccatgcttgtgtgggaagtagagcccttactccccagcccttactactcctaaaagaagcaaatatagacctgaagaaatgattaggcgtgccatgttatttgacaactgtattccttaatgcatatgctttatgcaaccgcaataacaaatttgtggaaataaaggctttcctgggagcataagagctgattatacccacctctacattcacaatactatatatatgtggtggtttgtaaggggtggagttgccagggccaggaataagctgctgagaagcagtttgagagaatagggcttttctttggacttatatatcgtatatcatcattcctgtctccatgtcacttctctgaaccctggcctagatgatccccccaggtccagccttcaggatgcgtgtttcctggtatcaatagatccaacactgctgagtgttgtgcttctgtttgttcacccgccttatattgcacgcgtcacccactggtccccgttagggcttttcactcatgagagaaatcatttgaggggcctggattaatctctgttgctgtgtaaagcatcctctctctagcaagtcagtaggaaagggggttattgggcttacaattgcagattccattctatcagtgagaggaagcagaagcaggaacatgagcagctggtcacccgatatccacaggcaagagaagagagacaaaggacacaacacagccttgcttgcctgctgcttatgctcagctagctctcttcactcctgtgtaggaccgaatccccttggtcaagaacagtgtcacccacaatgggctgggccctttcctcatcaattaaacatcaagacaacccccaacgcacaggccaacaggccaaataagctagctcattcctcaagtgtgactctttttccaggtgactgggtgtgtgtggcaactaaccatcaaaggcaggaaagggtggcatcttgttcttcacctctgttgttgctgccctctcctgaccacaggaggatgccagggtgggaaagaccatgctactgcctactgtgctgtgcagttgagtgatcttggtggggggagggggaggtccacatttgttgtttccttttactagacagtgcggagtcctagtgtatctcagtctttgcagttttcatcttcacctggtcatttctgctgagttgtagattcttcacttcggttgtgaagccatggtgggtgctgccagccttcctccctttaactcttctcactgggaccttcctcctctccctgagcctactgtatactcattcagtgtgctgcctcctgccctctcatcccctcgtcctggtgcactctccctctactctccctgcctgaaattttgcccattattcagcaccatgttcaaagattctcttaaaaaataattttccttgtttcgagctgaattcgaaatgctggcatttatcaaggcaaatcgccctttgatttctcagtaatgtgtatttcttctgaagctccctgctcaactgaatattaatgcagacatcctgtggtacctgggtagttcctgaaatagtttgcttattgtactgcacagagccggcatcaaaaatattcttgagattagcttaggaaaagcaaagtgcttaatttagcccagtgacctagactcactctccaaactgtccatgagcctttagaaactatgaattggctttaatcagacaccacatgacattttcttctgaagccattgtaagcaccttgagatgggacaaagcataggactacaccctgggacagagtcctttttaatacttggaactggcccaagctgtacataaagaatacatagtatgacaggcagtgtatcttttaatattgtttttattttatgtatatgagtacactgtagctgtcatcagagacaccagaagagggcatcagatcccattacagatgcttatgagccaccatgtggttgctgggaattgaactcaggacctctagaagaacagctcttaaccaatgagccatctctccggagcagcaatgtatttttaattattttatccttagttatatgtatggatgtgttgggtgtccataaaagtgcagttgctagaggaggacaaaagggagtgtcagatcccttgcagctggagttacaggtgaactgctccactgggtcctctgaaaaccaatgcatactcaatctctccagccccaataatgtatttttaaattctaagcccccaaagtaataagttgtttacaagtgtgtatgtgtattgacccatgtacgtggctgcacatgtgtgcacacatgctgtgtgaggtgagaagacctaacattctgaccttaccatttgatccaccatctggagaaaatataactaacaagacagagtcatttgcaagtatctgttccttctgtacctatgaattattcttcaaaaccacatctctctttccttccaggaaaccagaggctttgaagtcacaagaagagaaggtaggaaaaaattacttatatctctatcattcccagtgctgacattttggaagtggtttggctgaatctaagatgaacgccagcctatgggcagcctgttctttgaaatgccaagctttcctgcctgctagctgtttgcttcttggctcaagagacacaagaacttaaggctgggtttgcctgtgaaaacaaggcttgtaccttcaagtgtcagaggcggctccaggggactggctcactcctgaccacatgcatggtctctgaaggagaccctcatttgggggtgacatttgcagtcatttggtttcaagcagaagaagtcattaatgataaccacaacaaaacaaacaaatgaaaaatggtttagaatttggggagtttgtttcattgttgggtaggcatcgccactatgaaaaatgcttctgatcagatttttacagcttcagctaagccagaatagaaataaccaattaatttcccccttgaaaacaattccacgatgttccattttccctgccagccttcctctggcacatttgttctctggtctcagaggtaagcatgtacggacggcaatttcagaatcgtctaacggaaatttcttttatttactttcagtaacagctagtctctaatgagagaatgtcttttgtgcgatttgttgaatcatctctttattgtagggacagaagggagcaaataaagtcggaaaccatagtgtgttctccgtctcacatgtaggctttgattctcgccctaaccccactctcctccactgtactgtctccaagaggagaatactggggtagaaaaacatgcttgcctcctaagccaaacatatccttcctcctggttagttagcatccgtgttatggagtataacaagaagcttggatagctgtggtaccggcatgccacttaagagcttgataacgtgctggcagtactgtccacaccggacacccagagaaatggctgccatctatgcttctaaaaccataaatccagaggacctgggcaatctgattctagagtgaactttctggcttccatgtgttcagagtgcagtggtctcgggaccacaccaacagggtgaaccacattctttggatattgatagcaagttaaattggaggaaggtagattgggggggggcgtgtttttgaaaattgtgttcccagtgggaacggtgactgtcagctggaaagaagtagctgtaatgaaggtagacattggcacgaaccgcgtggctctgaataataagctgtcctctcgctgacaatgtctgcagttaatttgcacgaaggaatcacatataaacttaacctttttgtaatcttactgtctgtatgttgaagatgtctctggttaggctggagttgtggggcagccctctgtatttattttcaaagacaaaaatgtctaaaatactttggaacgtacagggcttagactccctcaaaggctgagatagagtatgccaggaaagaaaagacatgtgtgggctattctgtcttcattcacagcccggctcccacatcagcatccacagtgactgactgaggacacgctgctctttgggctgttattagcaggtctctcctgacaccccaaacttagttttctccaactgtgaatgatgtcttccttaggtttttgggtttttggttttttttttttttttttttttttttttttaatgttagcgtcaaatggttaagagttcttgaaatagcttgatgtcgatgcttgtttgccacagaccagtgagaaagggagattggggccttgaaggatatatccagggttttggagacctgagaagcccctgccatgggttgggtcaatgttctgaacagtatttagtataaaaaaatgataatagaggtgctgtggaaatttcaccgaattattcctatcaagaaaagtaggtcattattgtctagctacacgcatgctgctccaactctacctgcaacagaagggttcagtcctgctcagttctccaagcccagaggcgtccagggtgctcaggagagactttgagtctaaaacgtcagcctcctgactatggaatctaagagaattttccacataggttgtgtttggtttcatttctatacctgactcacagacaccagctctgcctaaggtttaatgtctcagacatctgacccagggcagtctcccactgtgacttctggaagtgttgactaagtctgtgtggcaaggcctgagagaggctactggtattctgggagatgatggagtctagactgaattacagaggggcagggacgagggaggtgatagcccgtggctttattcagtgctcctgtagcctgtgtgctttgggctttatcccaagtcacctctacttcatagcatctaactccttcctgaagcatttggcttatgctgccaatccaccctactcatcacctgaaatcagaaacctcttgtgttcctctccaacttccccacaatcctaggccaagacctgtaattcatttaatgtatttccctattaatagactattattatatttgagaacttcatttgtacatgcaatgtattcacccctattccttcaatccatccctgacctacccctgccactaccccctcaatttgatgtattttttttctcataaactgttgtgtccaatttgtgctgcttatatgcaaatgcatctgatggcatctgttgaggcaaaggcaacctgtcagatgccacacccttaaagaaaatgactctttctcccttagcagccatcagctgtccatggttcctaaggtaggggttggaggtagtgagcccctcccatctatgctggactgctgaatggcttgatctcaggtaggcaactataactgagatgagttcaagtgtactggtcccgtgtccagttctttctgactgcttgctcttagaatatctctgcccctttgttgatgtttcctaaaccttgggcacaagagctctgatgtagatgttccaattctacctgagtaccccatagtcatatattccctgcattttgaccagttatgaatttctgtgttaaacactgtccactgcacaaaggaacttctctggtgagggctgagagtgtcattaatctatgggtatagagggacaattacatcttgatcctaccccttgggaagctgaagatagtttgatgttgtgtccatttaacaacatagtagggcctccccagccatggcttcttggctggatttatgatatcagccacacagcttctcctatgaaacaggccttatatcaaatcataaggtggttggtcagccccctaacgttcatgccactattgtacacatgtcttgccggctgattgctactgtagctttcccagttcacagctgagtaagctggctgatggctgatgactttcccatcaccctgcctaggaccttgtgatgataattatttcttgaactaagtacaagttgcccttctgaaccctggtctcatctttatgatatactagtgaggacccaagacctttgggttttaaaaagataatttaaaatagctattctggattgttactataagttttaaaaataccattagttcttcagagtgcattgccatctctggtaatattatatgttcctgggtgatgcattgatgaaagggctttaggttcaaataagcttggtgttatgggctgaatgtgcagctatattttgagactctgttctcaaagaaaaatacagattgacaaaaaaatatagcatagtgaaataataagccagaatttgtgaacatgaccttctattaaatagagacctacttaataagatctctatagacaatagacataccaagttaagataaagtcatactggatcacttttggctttagtcccatgaatggcagtgcgaacatcctctatagacacagaaggggagtgccgtgtgaagacagagcagggcattgctggcaagcactggctaggaagaggcgtgggaggactattccctagagccatcagcggggatcgtgaatggtctgaccaaccctttctttgattttgtcttctgatttttcagaactgagagaaaaatgaattcctgcttttgaagcctcctggcttgtggtactttaatgcagtggtgctggggcacagtacattcagaaagtgctgaactctaagaaccggatgagctgcatggctgcagttgagtttgtctgggctgcaggattgctctggcttttgtgttaaataccactctcagcaaggaagataataggaagataatagtttccccaaataagcttcctatgggatggaacaatttaactttgctgtcttggtgttcatggctgccactgcacttggtgcctttgcaaggcctgctgtagtggatccgatccaggcaagggaaaagctcctcagtggccaggcaccagagctgagcctgcctggaatggcgacgtgggcacaatgatgctgacttactcactatgagtttcagagaattctttatgtcccttgacctttagctaagcagacagcatcttatacttgagactcctttttcctttccatgttaccagtggtgacaaggactctgcccgaacctccttccccacataggacttctgcctctcggttgcaccccacacgtataagtggtggctgtttaagttgtctgatcttgattcatccccatcaggtgcatagcacataccactggctaccaagcctccatagctagcctcaaccaaggctaggtgagacattccccacacctcaacccttcactactcaacactggagcactgctcattcttgtacgcatgctaaactcaaaaaagttgagagtgccacctgcgtctcatgaagttaggcttatggtaatgactctcttatagtagtaaaggctgaggtaggacaagaccacagagagtctctaggcccggacacctgttctacttagagaagcaaaactgttgcttcttcatgagagccctggactgaccttgaacctaatgttcagagcccacctgtaatggctgcacaggaaagctgccatggctacattctgtctgctttccagaacgagaatttttacatctttccctggacaactaaaaaactcaacgtggtgtgtgtgtgtgtgtgtgtgtgtgtgtgtgtgcattttgtgtgtgtttatacctgtgtgtgtagaagcatatgcatatggaggttgagggtgagtgttaggtatctttgctgaacctggaactcactttacagtaataaagattgggataggacaagaccactgggtgcctctaggccaggacatgtgtccttagaggccagctggccactaagctctgtggatccttttatcttcacctgtccagcagcattggaattacagactcagcatcctgtcctacgttttacatggatgatggggacctgaactcacagtctcacttccatcaagtcttctgtccactgagctgtcttcctaggttgagcacagtggtttttttttttttttttttttttttcatccctctccagacacctgaaatttaatttcaaccttttctgaaactacacagtgaagagttgccaaccctggtccttctgagacactcccgtgtccacgaagagggcaggtgctgattgtacctgccagagcccatctactcactccagcactttctctgactgatcccatctctttgaattacagctgtgggagcaccccagagtgtggagcaagtggcttggataattcagcccttgtcagctatctctgaagggcaggaggtgatctgtaagctattccagatgtctgtgattgtgctgtgattaggggcttgagtttggagctgggcactggggtgtcatgttagattactggccctcccaaggatggttcacttactgtgttccagacttagccagctggggggcctggcttttcagcaagacaatagtgagactgggagggcaaggctgctgctatcttcagaggagtggaaaggaaggagggagactgtcacccttatcctgggtgacgctgggtacttagactgcttagcaatgcaaatcccccaactaaacaggacctgcctacattcattgagttggaaactggaaccctggcttcctgaaaacccctggaatccattcccagtcgacagctgcctctaatggcccctttattgttctgtgcatctgggggaacttcagatatcaagatccttgtggtgtttgccattaattctgattttgtttagcagatgtttcctggatctctcagttgcctgcataatgtgtcttagtctaatgtgaaatagctgactctgggctgaaacagatgattgaactcccaggattttttttttttttttttttttgaggtgggagtggagagactaacttctttactagccacagatggagggaacataaagaaaaccaaccagagttgacagtgttcgaaccaatgagtccctttcagtcccagacttcatccaaggctagatgaggagttcctcacatcctaacccttccctccccaacactggagcattgctcattcttacacacatgctgggctcaaagaagttgagcatgcgacccgcctctttacagtcctgacttaggagatcggctttttctgtggcacgctgtcctttttgtagcagatagagttgtacccagctgtcttaaggtaggtgggaaatgggcaagcctgctgcaagggtgtctattcaagggcaggggttctacactcaagcatttttatttgtggttgcataattgtgtgtacatgcatgcatgtacatgcacgcacaagcacttgtcacagcctgtggatgtcagaggacaaattgcaggagttgattttctccttcttccatgtgggttctgttgactgaactcagatcatcaggcaaagctgcctgctgaaccatctcacagttcctccatactctacaaacacctcttaaataccgtgctcctagagcgaatccttgggaattaccattgtaatacttggcccaggaccagggatatcttcccagagttcatgagaagtcacactgtcaaatagataatgatttttgtcctactttcatttctgtttctgtgataaaataccttgatccaaagaaataatagggggaaaagagggttattaaggtttacaattccaaattgctgtcataattataggggagttgcatcaaccaggaccttgttacactacatccatagtcatgaacagagagaaacaatgcacccctgccacttgcttgctcactcaggaagttttcttgatcttacacagttcagagtccagtctagggaatggtgttgcccacagtgggctgagtcaattaattatcagtacaattcccacaggagatatcactacaggacaatcagatttaaataagtccttaactaaggcattcttcctgggtcattttaggttgtgtcatgttgactgttacagttaaccagcacaattcccccaaaggtatgacccactgcagattcacaaggactgtgagatcagctcttccccaggtctcctcattacaacccaacccttcaaggtgtccaggagatgggggagatagggacactcaatgggtcctaccaggtccttgtgcagaagttgcagctcccttgagcatccagcaaaagttaagattgacatttgtcatcttccttcctttcttagcccccaaagcaggactctctactttttagcaacctttgaaatggtctcctctctgtaagcactgatgctttgtgaagctgtttgctccagcatattaatgtgccatcagcaagcctttggagttaattatctgtgacttaagaaccatttatttctgtctctttgtctcattgtcacccagcacttttctttattaggaaacaagtagagaaccaactgaccattatgtcctaattctctggctgtcatcaaaattagtttacctcttaaaaattctttttaacagccccacctcccaaacctgtgccatctcattattttcagatcgcgttgtctcttaacaaatctttaatttctctgctttggcatgagcagagtccaaactgggaccaagctgaaggaggaagtagctcatctaaattagcaaggctgtcaatgttctttcatgatttatcagccttactaactgagcagttggctttttttccccttccatcctatgatgggagcatcacaattgtgtcttcttggatacacatggtgaggaaccagctgtggtgaccctgaagggccttttcaggtcaagtgaccataggaggaccaatgagttataacctgctcatgggtctctctacactcctatttggttgggtttggtatttcttgcccagggattccattcagttcctggaactgcttcaggcctgcttatagaggcttggtgtgtaatgttagacctcaccctagaaaagaagaccttgcctcgatgtctccaggaagtcaggaccatgtgctggaaaaacgagcaggtgggtgggcactaaagcagtggtttgttgaaaacccacagcctcctgggaccaagggtttagccagtggtggggcttgggaggtatctgggtgtggttggcactgtgggatgatgcacagagctaatttacccctatctaggattagcaactcctatcttcccctgtctctgcaggccacacttgggtgttctttcattaccccaaaggcaatgtcctggagccatgttggacagttagtactggttatggagaaaccactctctgtgcacagatgacacaattcctaggtcattggttgctaatggaagtttccttgaggtaattgaagagtgctgtgtatacagagatgaggatctgtggtccctggtagctgagttagctgagatgatacaggaaggtcctgcagacagaaaggctacctgtgtgccatatctggctacctccttacactagaggggtcgactatagagtgtaatggaatttgctcagtagaaaggatatcatttcctggtagaacaaccctctggatattctattcaaggtagaatattagaaaaaaatatgtatatatatatatgtatatatatatacatatacacacacatacatacatacacatacacatacatatacatatgcacgcacatatacacatacatatacacatgcacacacatatacacatacatatataatagagactaagaccagattatgtgatagggctgagtagtcccacagtggctgtttgcatgctaacaaggccaaaattctcacagcttctcagaccaccaagccagatgcctcagtagtcctaacatggcaccgaaggcccaaaaggtccaggagaatcacttgtattcaatttatataagaggccaaagagcctggactctgtgccggggaaagatggtcacagctgcaatggaaacatttgcccagggagatgtagcatatagacaggcagctgtgttgtccttgggccacgggttgtctgtcctcagtcttctctggaaccatctttgaagacagggaattataaatctagtcaattgacaataaaaatccaccaccatatagaatctcaagtctttctctaaagcatggctgtcttagaagagggtctctctggatatatccctcctcaatgttgcacaaagtccctggtcactttcttgtgtcagataacaagacccaactggttcaaaccaaaaagatgatttggtggacttagatgtaactcgacaatctgggctcaggggttgctgtcttcaggcacacttgatgtgtcccagagacctggctcttcccttcagttcacctctctggctgacttcccttacagtgagtgccaaccctcctcctcacagggcaagttcaggggaagagaggcagcatagtctcagcctcccactgaggtgctgtggttcccttcatagtctcctgagccagtgggtgaggactaggggaaagtcaccagctgtatcctgtttgggagtatactggctagttttgtgtcaacttgacacagctggagttatcacagagaaagaaacttcagttgaggaaatgcctccatgagatccaactgtaaggcattttctcaattagtgatcaagggggaaaggccccttgtgggtgggatcatctctgggctggtaatcttggttctataagagagtaggctgagcaagccaggggaagcaagctagtaaggaacatctctccatggcctctgcatcagctcctgcttcctgacctgcttgagtcccagtcctgacttccttggtgatgaacagcagtatggaagtgtaagccgaataaaccctttcctccccaacttgcttcttggtcatgatgtctgtgcaggaatagaaaccctaagagaaattggtaccaggagtggggtattcctgtgacaacctgatcatgttttggggaggactgtggaaggacgttggaactttgggcttgaagatctatttgttgttaagagttctgtcagatgttgtataggagcttggaagataatgttgagaacagtacagaagatggaggtctggcttgtgaaatttcagaaggaaaattaaagactcttttcagggccattgctattttaattgggaagattctgtggttctggttagctggggctgaagaatcatctgtgattaccaacataccagaactataaagtgaaacttttgcattactaggactattgttgatgctggttagctggagctaagaaattagcggtgattaacaagagaccagcatcgttgaggtgacatcttctgggaagtgttttctgaaagcacaaagaggctatgttccagagatagccaaggttgtactcctgctgcagcgggacttggtaatgtgtaagggtcacccaggtggtacttgttttgaaggcatgaaggggtcacgcagagcagctgaggttcagcactgtgagaggccatggaaggccattggtgaaggtgcagcctcagttgcaattgacggctcaggactcaaggggtcatgcagtgttttggagatgccagcaccatgagatgaccaccaagagcagcagcagtggagtacaggtatctggagcctagaggacgacgtgtgtgctacaaagggcatggctggagaagtgacccaagcccttgaaggagcccagaagatcatgagttggatcccagacattggatggttagtgattgatttttgcttttgattgtgactgtgccctgatattttccctcttgaaggaagaaactattttagtggagcccacagttaagagacttttaattgtaaaaagactttggattttaaaagatattggatattttaaagggattgacttttaatatgtaaagaccctggaacttttaaagttgtttagatcttggggatgaataagaaattaatggttgaggcttactagtgatgtgtttgtgtgtcaagttgacaaggggtcaattgtactggcaagttttgtgttaacttgacacagactggagttatcacagagaaaggaacttcagttgaggaaatgcctccatgagatccaactgtaaggcattttctcaattagtgatcaagggggaaaggccccttgtgagtgggaccatctctgggctggtaatcttggttctataagagagcaggctgagcaagccaggggaagcaagccagtaaggaacatccctccatggcctctgcatcagctcctgctttctgacctgcttgagttccagtcctgacttccttggtgatgaacagcagtatggaagtgtaagccgaataaaccctttcctccccaacttgcttcttggtcatgatgtttgtgcaggaatagaaaccctgactaagacagggaggaaggtgaatccctaaaggacagctgggacatggaagcagaaaagctaaaaacaacaaactccctggggccagagagatggcttggtgggaacacacacctgcctcttgaacctgaaccagagctcagagccgacataaaagccagaagcagtaggacaagcatctgtaaggccaacatgcctgctctggagatgggacagcgtattagtatgaagtccagactggcctaacagagaccaacttgcctttgccttctgagtgctaggattgaaggcatgcaccaccatgccctgttcacactgtccacatctttcagactgtttgggcacaaaaggttccctcccttcaattctgcagacaagaagagttctaatggaaacatttttagaatagccctatttgttccctataaactccttctgagatgcagcaatgcgctctcattttgtaaatagaaagaaaaaaaaaagattgggtggaggaagtcaagacttagctctgtaggaaattggtcacagaattgaaccatgggtttcccagaggctcctggggaaaatgtatttgctttggatatctgacagtgtttatattattctgtcccaaagttcaggctcaaacatggactctgttcttcatatgacatggcccacaggcgtggaggacaatggaccatcagggctctaggagatggcaagccttgcttgcttgggaaccctggcttgctgcagccacaaaaaagcggagtaccaccccccaccccccaccccccacacacacatcagaagacatggggctagtggagagtcgggggaggaaaggagctacaacctgtgtactgtagaatttccttttggatggaagcagcgctctcacccagcagctcagtgacttcatctgatgtcctatcattttcatgagccactgagccattcagacacaagatgggaatccaatggccaagaagaaaagattacagcagaggctccaatctgataccctgcttagacacttgagccatacagaaaatgacaagatctcttgctttgtctttaaagatggtaggtttgtaaaagtgggcaacgagatctctttcccccttttaaagactttgaaataatgtcttgatgtgttccttggctgactttgctctcagagtgctgtctggtttcccttctcttctcatttttacactcatttgtctgtgtatgcaccaacatgtgcgccatatggaagtcagaggacagctgtgagtgtcagccatcttctaccacttgggtcactgaggtggttgtctggtagcaagcgcctttctttacccagtgaaccatctcatcaacccaaatctgtcttctttctgacatgttaaagaaaatctgtaagttagaaagagtgaagatactatcattggtgttagaagatgaatcaagctcagagacagtgagggacttgtccaaggtcacacagcttacgacattcagttctgtgtttgcattaagcttacttgaggaagtttataaattaaaattcaataggctgggattggagctggggctggggctggggctgaggctggggccatagctcagggtccgtccccagcactacacactaggcatggtaggctgtacttgtaaccccagtacacaggaggcagatgcaaggggatctgaagttcagggtcatgctcagctcaagagagatggattccatgctcagctacttgagattggatctcaaaacaagcaacacagcagcagcagcaacaacaaaacaataggaaatcagagttaaaaaacaaagaaacaaaaaccctttggggtggtattctttaaaataaaatactgcaagaacttacctgtcaatgtaatgatcctttatttgtaaaatcaggatattcaaaaggagagtcgagtcacattcaggtgcctgtctatactgatgtttaagtaccacatgacataacatgtttgaaataatgacagtttaaaacagagccgaaactattctctggggctggagaggtggctccgtggttaagagcccttgctcttccgaaggcagcagatctgagcagttcagatccaccgggttcagttcccagcgcccacatggaggttcacaactgtctgtaacttcagctccaggggatccaataccctgttctggcctccgtgggtaccaggcacacatgtggtgtacatacaaacatccaggaaaacactcagacaaatagaaattttaaaacagaaaaaataaaccaagctttattgtcacatgtcaacagacacattagtaacccccaagcccagaggctcctaagatgaacatttctgcagctgtgctgagagctccctgtggtctggagactagagcctcaaccttgaactcatgaccagccatccacaggtgcttggtggaggccagaaacagggtcttgattcgctcatgaatttcaaagttcagtttccctatgttctctcaaaccctatatggttctatatagggtttcctttcttcttctttaaaaaataaattgcatttatttagtgtgtgtgtgtatgtgtgtgtatgtgtgtgtgcattcatgcattttgctcaaatttacatgccacaatgcacatgtgaggtccgagaacaactctgtggaatctggtctcttctttctcctttatgtgtgctctggggatcagagactcaggtcattaaacttggtggtaaacacctttacccattgagccatcccacctgcttcctctgcagagtttctgatgagcatagatgaagggaagccatataagcagcaggtaacttttggatgcggcacacctttccaagacaagcaagtgggagcagtgacattttatttcttcttgttgttaatagctcagcagcagctgtgtgtttaggaaataataaaagcattgctccttccccaagagatttccacaagcagagctgtccagggctgacccatctgtccaaatcccacatctccacgcagagtgtctcaggagaggaccagatgaagccatctcagaaccacatgttttagacaactcttagttcagagtgcatccatgcctgatggaagggtccattaggatgcagatgcaggaagcatagattggaggtgctgaagataaagggagacatgggtccacagcctccaaccatatttaggtggcctggggaaatattaggtttgtctagcactctgggaagattcacacctgggggtttccaaacatcagccgctgagccaggcttcatagctgtgctctttcaaccaaacagcctgcccaatggcaggaatggtagcaaccaggccttccatgacagtgccattcatggtaccatcccagcagatggaaggttcttgaacctactgtagattgcatatgaagcaccaccctcccagaggtccatgtatttgctatagtttggtcccagatggtggcattagtaagagatacctggataaggaagccctgacctcatcaaatggaccagtttatagatgacttcatagctggatgagctgttaggaggagggacctggctggagtaatgaatccatcactgaagaagtacctttgaggtctacagcttgtgtctgagcccctgccaacctctctctgtcactttttccctctttgcttctgttgccatgaagtgagccgccctctcccactgtcctcatctgccacagtgctctgtgtcactacagcctatggatgctgggaattctgaactctgctatattcgagggactaagagagccctctgcacacacaaggcatcctgttagctgctaatgtaaacaaaccccaccgttagggctctatctctgcttccctgtaaatactccaaactcactttaggttctgccaacttaactgaacttcttctgagccattttagatcctccagtttaggaagcaaatgcaagcttctccaagatctgagtctgatcccctctccatagttgtttcaaacataaggtagtctgcaagtctacaactgcattttgtttgacttgtattatcgacttataggagctttttgttttgttttaattttgatttgaatgagttgccattaaaaaggggagcattttgcatatattactcaaaatgattctgagcctacatagcacccagcaaaaaccacactggaggcagatctgcccccagatgtgcagtcttccctgtctgatgcagttcacacacgccactcccttaggcacctccataccatgagctagatgcagttcaggaaatgagtgaagccttggaaagttgcattcatcaagctatctatgtgactttaggaaacatttgggttaatttattctacactctgtgtgtgtgtgtgtgtgtgtgtgtgtgtgtgtgtgtgtgtgcgcgcgcgcgcgcgtgccacaatatggggtggaagtcagagggaaacttgatgggactggttccttcctttcacaatatgacttccagagatcaaacccagttttcagggttggagtaagcagccttggcagctgctcatctcactactgcactcaggtgtagcaggcactaaccacagaatagcagccagtgtcagtaagaggagagcaagatgaccacccccaacaccagaggcaaggtctgacccatacctgctcctcaccccttcaaagatatctgagaacactagtgtctagaagtgggtcctcggtttccccactcaactatctcaatttttgctattaagtctttgatctagaaacattcactccaggcaagagatttgcaatcaagcattgggtgtggtaattaatatgtgtgcctctttatgtcagttgcacaaatttaaaacagagtgttgcttaagcatttaaaagacactccacgtgtgttgaaagtaattactttccaaagatatttcccacgaatgtcctgttgcatctaaatacgtatttataggactcagtagactagaatagttctaattgatatatttcagttcactgggttaaaaaaaaatagagaggcattttgaagcatgtttttaatcagtgtgtttgtcacaaagatagtgtttgacatctccaaaatcagtcacatgatattagaaaaatattacatatggtgggctccccgcacagatttagaacttaatgagaggtgacatcttggtctaagcgtgactgtggctgcaactttgaatctgggctcgtgaatgtcctggagctcggaggagctgatgaactccctcagcatcattttcttaatgtgcaaaatgcacatgacacacagccactgcccttgtgtggcaagaactaatgctcgctgagttgcaagcgttgttctaataaaacagtcttaattgtttgctttgtacactttctattttattgtttttattatttctcttgcctccgtaattggtaattattgggttcccattaattctttattagtgagtttataaatgctgtcttgtgatttatccttctgctcacactcgctttcccccacatgtcattagcagaggcaagaggctggtgcgcgccactctgcctgcctctaatggggccagcagggctacgaacagcttctcacggctcactcttgtctttaggactgatcattcccaattacttggttgctttgctgtgaaaggctgaatatgaaacccaggaggtttattagaaaagcattctaagaggcaacttacccagatgaacagtgtctgaacaaggaccccaagctcctttttcctcttttacttttttttttttaaatgggagagaagaggaggagaaaatgcccttggattgggacaagcctcctgggtgtaaatgatcatgcaatgtggcatgctgggtataaggtcaagggatcatcattcatacagaacagagaggccaaggcccattgagcctgagctgtggtggcttgactgtatttctagctgctgctgttactcaggtccattctcctgcttctctgctgtgatcccacataatctccaatcatggtctccttttgccggagggcacagctttcccaaattctgtaggcagccattctgaattctggtccaactcattggatcctgcatgaacttgaccaggttctgagttgtttttaatttataatttttattattgtttgggaacttcatatattcatataatgcattcagactacatctccagttgcttccctctgcttcctcccctattccccctatttttccctcctgctctcatatgctcctctctctccaacctctcttgtccattgagtctacttgatgctgtttgcatgtccctgggtgtaaggccacctatcagagcatggtaatctatctcagaagaaagctaacctcctctcctccagcagccatcacttgccaatagttccttggctaggtataggacttcatgagcatctcctaatccacactagaattcaagctggctcaatcttggacaagtcttgtgcatgcagtcactgtggttatgagtttgtacatgtagaggccccatcacattagcactttcaatgcagacatccatctacggctcttagaatctttctactcctcttttgtgatgatccctaagccttgtggggatggatatgagatgtcccatttagagctgaacattccagtctcttattctctgcatgttaactattgtgattttctctattaatctattgcaaaaaataggcttctctggccaagcggcagtgaagcaatgcctttaattccagcactcaggaggcagagttcaaggccagtctactacacagagaaactctgtctagaaaaagaaaaagagaaaaggcttgagaaacacactgatctattgatctgtgagtataaagataaaaactaaggaagtttattattgtatctatttagtgtaataattagacccctaggatctatgacctagttagcccttgagttttggctagttaaaagtaccaagcatgggtcccatggctaaaagttcattcagcaagtggttactcataatagtcatgccactattgtaccccagtgacataccttgccaggccagtcttcattgcagctcacagagtctacagctgggcaatattttgttgattactcttctctccctgtagtgtgtacatcatagcactaagaattatagccagtgctaagtaccaacttgatttctccatgccctgtgactcaaatatatggtgtcttaagcagtaaggtcttaccttcaagtagttctgaaggtaacccttagtattaccccactgacaaacaacttgaataggggtaatcctgggctttttatttgatggcctcttgttcctgggaggggaattgttcccctgctataagggagttttgttttttttttaagatatgaatacatatttaggatacttctacaaccgtaggtgtccctatgacattttcaaaggtctttagttacctctccccatagtcattacctaccctaccctcccatctcccactcaatccatcctttcttgttccattatcctccctcccctttaataccaccatctcccactcaatccaacctttcctgctccattatcctccctcctccaacaccacctaagccctattctgcttcatgtgaagtctctccagtccctacccttacccctgtcatggcccctcactagttttctgccttctctggtaactcctattgaaacacacatatctcaagattcaaagctagcatccaaagatgagacgtcctttcttgttatccttcactgttggctattatgcggtcctgtttgggatggaggtcctctccctttctctgcttgcagtaatgggaagcagggggtcttcagagagcactcgttgagatgcattgttcaggaagtggtggattaatgcaggccaacttattttcttttatccctgctaggtaatcacatttatctgccatgcagggagaggagtaataaagtcaaaactctgggattgttttcgaaggctgttgtttctgccacgtgggagatgggataccttagctgactttctcacttatagcaattgaaaattatagggaaaatatctcagctatcctttaaagacataagtggaaagtccgggaagggaagtactggtaaagagccagaaaaaacagagacaataggaaaccaggcagacttttttgctttgagagtccttgtcctgtaccagtgaccttgagctctgatgtttgtgacctcaggaggcatagggttaggagctgagcccaggacacattagttttttgtttgtttgtttgtttgtttgtttgttttttagaaaacccacttcagctaccatggaggccctgcagcctcagtgttagttctgatagaagtcaccatgcctgccttcccttagggaggaatgatagaaattgtttgtctcagaacatggtgccaggcaaaggcaggaaccaggggagtgtctctgacttgcattttcatcagggttcctgtggtaggagttcttaaggagacctcaagccaagaactgactgtaagtggccccagtacagagtattctagggtacctgggggagtagacaaaccctgaccgagcaagctcttcaacacagaccttgggatttttgagtgtgttatcctgtcctatgagcgtctctgtcaaaagctattctttaaatatgaagagaagcgaggcactaagtaagaacagcagatagagaaccatggacacttcagataattcaaattaacaaatacagaataaagacatgcatgatagaaggaatcaaaaagggagctgaaggtttgagcaaagaaaaaaatgccataataaataaactatttgaaaaaaaatctgaaaaatagccaagtgtaatttttagaaataaaaccattaattggcattttgaacagttaaagctagagaggtagcttagttgatgaagggattaaaaacttagggacctgagtttgctccccaggagctatgtaagaagctgagggtcgggctgttgagatgatggctcagtgactaagagtgctggctgctcttccggatgatataggtttgattcccagcacccacatggctgctcacagccctgtttaactccattgccaggagatctggtgccctcttctgttctccatggacacaaggcacacagatagatatgcacatagataaaacactcatacatatataataataatttataataatagtaagtgaagcagaaaaaggaaaatccctgaggctcctggatgtacttggtaagctccaggcaagagagagactcacctcaaagtgacaaggtggatagcacctgaggaacatttttttttttttacctatacccacatgtgaacaggtgcacttgtgcaaatatgtgttcatgcatatacatatgcgcacatgcacacacatgtctatgaacatgtacaagtgcatgcacacatgcagcccacacaatttgtggatttaagggcaaaatgggtgtgactgaagagaactgggtggagttctggatgcgcacggagtgcacttgggcgttagagccatcgaggttgcagagtgcaaggacaaggacagacacacttgtatacttgtatagggagtcacaggaagagaggaatcaggtgaccggtgtcagaagaggtccaggttggaatctttgggcaaaaccaaaggaagatggcctactgtcagacatagtaagtctaataaatctcaaagaaaatgaccaaaaaggagtctacgtccacatgttttccgaggacaaaacagtgaccttagcaagagccacagaggaaagacatctcttatgaagaaatgcacttatgcgcactttccccactgagatcagagagcagtgtcttgaatgtgttgaagggacgattggtcattatggaattttagacttagtagccatgccctatacctctcatgctctgcctgtctctccatctttacattaattaacctttacttttcaaaatgtccattttgatgttgtctagtcaataatttctcaaaaccagggcctatgtttctgtgatctggagtgcccatttgattctttctaataggttccaattacctgttgccattcccatctttctctaactaatgatagcaattttaaagttctctctctcctcgtgtcaatatggcgagcactcagagtcagcattagtgattttattccatgattatgagtccccttcctgtccttcatgagacgagtttggtttccctgagagtcgtaggtacagaagactcagctttggccaatggtcctcactcaaagaacaaagccttttagaggtcagttttgacatcaagtggcatactacagtggagttctgtcattaacttcctggaatcaacctgggccattctatcttccatggttggattcagtcctcagtaaggccctctccattcacacaccagctacaggttgaggggtcacccaggccacctgtatttcagaatagctggctgtaaattctggagtgtccatgatccctctgggcttgatgagacattagaacaatgctgaactcaggtctgtgattacaggtctctttgttatgaagaatacagatcaagacaagccaaatgaggaagcacatgtccaaagtctaagctggctctggatacagcatggctgtgctcgctccccgtggcagcagggcttcagcttcctggtgctcatcactggtgtgttcaccagcctcagagtccagagatattttttaaagatttatttatgcatgtctctctgtgtgtataggccacatgtaggtagatacccatgaaggtcagaagtgggtgtaggatctcctagagactgatttaaagggacatcatatggatgctagggactgaaacactgtgtaaatctctccctctctctccctctctccctctcacttcctccccctctccctctttctttctctctctgtttgtgtgtgtgcatgcatgtatgtgtacatatgtgtttgtatatttgtgtatcagggtacaagagtaaggaccagagttcaaatctctagaacgcacataaaaaacagttgagtaagtttaggagcctgtctacactcccagcaaaccaaaaggcaaagacaagatcccagagcaagcaatctaggtagactagctgaagcagcaaaggccaatttcagtggaagacccagacttaatatataaggtggatagcgatcaagaaatgatctggtaggatgtcaacctcaggcctctactcacatgtagtaacacatgataacatttacatgcatgcatccttacacatgtgcatatgtgtatgcacatacacaaacactataaccacatacataaaatggaatgaaatgataaggaccaggggcatagccaatggcagattcctggcccagatggagtccctgacagtaatgataataaataatacaaagataatgaaaatctggaaatagagattacagtcaaaccaccagagctgcctgctggttatcttatcaaagagagatgaaagagtcacagggccttgctggagagtgagatgcttgccaggccaagggtggctcattggtacctcctgaggaagagctctgggttccttcccagctgtcacgagtggatggagcatcactaaacaataataaatttaccaggaacatgaacattctaaatccagtgtgcttatcaaggtagttagcccagcaaagataaagtcttctcatgaaggaaagtagacagattcataattgcagcaggagctattacataattttaaatagctctattagaataagaaagcacagaatttgatgagttaaatatcctactcacagagttaggaaaatactgttagaataaagccagtgagccagagggaataaataataaagaaccatcataaaaaggatggataaaataatagtaaaaaaaaataacagaaaggatcaaaaagccaagttctgatttttctgaaaaactaaaaccagcaaaggtctgacaatgatcattaagagaagagaagagaatacactcaccaaggtgaaaggggaatttaataattgaatctgaaaattaacattctaacagaatcttgttatggcaacacagttgagagttccgatggtccaattcatagagagaaaaagaaaccctgccaacttaaataaaaataaaactgatcatggagccaaagaggtggctcagtgtgtaagagcaggatcttctaagaccaagcttggttcctagtgcgtacattaggggctcacaactttctccaagtccagctccagggaacccaatgctctcttctgtcctcccatgggcccctgcgctcatgtgcacatattcacacccagtcatacacatcataaacaagtcacaacactctttgccaccgacagggaccactacagaaaaccacaatcaatattcagagctgtggagtccagtcccagtggaaacatctacagaacgctcccatacctaaggctcagggaacattgcagaagaaaggctaggaagattgtaagagccctcagaggatcagggagtttgctgtgagattgtatatcctagtaatatcagaagctacacctgtaaagtctcaccaatgactgctcaaacatgagctgaacaagaacaccagtgaacacatcaaactgggcaaggaaagcccacgaggcctcaaccccacacaaagaactcaaaactgagaaaagctgggagtgcgagagggggtcctccccaaggaaaagcacaccaactgatggtcccaaatggtcagccctgaaaacatacatatgagtaacattatatagaagcagcaggttatatttgggaacatatgtatatatgtacacatacatatatatgtatgtatacatagacatgtatacaaatacatatatgcctgcaataacttaaaggtgatcagagagggaaatatgggagaccttggaaggatgaaggtgaagggagaattgtaataaaaagtgtctcaaccccaaaaggtaataataaaaatacaaatttaaaaattcagtcattctagtaattaatgagagaatcaggccaattgttgtaaattttactaccatgaaggcagcagatatagagaatgcccaggggcttccatcaagtactgggtgagctcctattttactcctgtctgaacgtttacactacagatgcttattctaaaagcgtgtgcacttacaaagctgaccgaaacctgaagcccaagcccaggaaggatggcatgggtgacaggtgtggttcggctcacccattatcccagcgctcaggaggctgagacaggaggatgcaactaggctgcctaatgagtcctcatctcaacaagaaaagcaaaaaagagcaatgtaggatggaggggaaagccagttgttaacataactataaaaaaacctctatacataaaataatgaactaaacttgtagtctaattttaaaaaaagataactcataacagtttgattttgtctcaagcatccttggttgccaccggattgtctctctgtttctttcatcatacaacttttagtagaaaagtcatgtgactgcccccattggtgtcggaaaggtacttgatccattcatgagtggtgtctctttcctaagactttcttttctgtcacctgtaatgtaagacctcaacaacaaatggtgaatgtaactgggtgcaaggagagcctggcttctcactgttgaggaagaagtgacaggtgaggaaagaggagggtctagaatgcacccttcgcttatggattggagtgagaagtatcagcaaggctggagcagaggcagaggtgttgtcacatttcccacatctccgtgataacaaagcccaggagcaggaacacatgacgctgcagtgagcctcttagcacccaagagttctcaactaaggcttacttgaggaatggctgattccagcaccaacaaggaagaaaacagtggctctggagtgcagctttgtgagcagtgagacattgccacagtgtcttcctgctggcttcaaaggacacactggctagtttgatctttgagggagggagggagggagggaaggaagnnnnnnnnnnnnnnnnnnnntgtgtgtattgaaggaaatagcaaagacaaagtcttcgctgcgcaaacacgagggcctgaatttgaccttcagaaacgtattttaaaatagttactgagaaggccaggcatggtattgtgagtctgtaaccctgacatggaagacacagaggcaggaagatctccagggctcactgacgagttagtctagcctaactgtggagacccagtcaggaaaaacaaggaggatggcactgaggaacaacacctatggttctcctcttgcctctccttccgcatgtgcatgtgcacctacacacacacacacacacacaagacaaaaagagatagcgctaagttactgacatgttttctaaagatagacacaaaaatatttgatgtctttttttttaattttaactatgccctctgtcattgaatgtggggcacattgatagaaattatatatagaatttctgaagttaatcataaaggtgggctggctctgcagtgctagttagagcacacatgtaggggcttgaacccctgtggagactctctacatttcctaaggtcactgtgctaggattgaggtctacctggtccatagaagagaaacatgtgggagaccctggactaaatggaggaaaaatagtgtcatgtcagccagcacttgacaacagctatgcatgagcagtttaactggctgcaccctccccagatacccagacctacagagacactgagacatcttgggaaatgcttgctcttaagtgctgtttatggtggtatgttgcatagcaataggcaatcttacttagtaagttgtcaaacaaatccgtaaagcctagtacattgtttggggacatcgtgaccaatgtaaccaagaagaggaagcaggaagggctctgaagagatgctgctggctgcagaagggcctctgtgagaagagcagttgtcacctgaagagccctcaggaggctcttaccaagcaagaagggaaaatgttatcagaagctagatgctagaggaccctccatctgggaaagaggatagttcgccaatattggctcttgtcatatatcaaggaagaggaaatctacagatgaaatgagttaagttgaggagattgtcaggcaggcaggatggtcaatgtccccccacaaatgcttcctgcttgtgataaaacatgagaggagaaaggtgagccaaaaggaccagctgcctacagggaaggtggtcagccttggtggaaaggtgcaggcctcagtgggtttgcagatcaagctctcagaaggaaaaggtgtcaaattacattttggggcaaagagcaagactttttgggggagaggctatatgttccattgtaaaatcttaggaatatgtaaaatgtcacagatgtttcccccaggagaaaggggtaaggtcttctagtgtatttaaggtttgtgtcctattggtactccatcagatgctggcttccagtgtttcaagagtgttcaggagtgttctagcagcctcatgcagacacagggattaggctcagcaatttgttgaactgtcttttgcctggaagaatagctatgagtcaggattcttagaagaagcacaactaataagatgtctgtatgtaggaaaagagtgacttcaagaactctctcctatggttgtgaacatttagcaaatctaaaatctggtagagtcacttagcttgctggagaccaaggatgggtcacagctcatattcaaaggcatcctgctaagataatgccttcttactcgagagagggcaacttttattgtgtcagggccttcatctggctggatgggcttcattcacagtaatgacaccagctgcatatctgtctagctgtaggagggcccccaagccacagtcagctcattgaattcatctcacatacctaatggttggtgactgtattacttgctattctgttgctgtgaaaaagcacatgtccataaacaacttaagaaataatttagtttggcttatgattccagagagatgagagtccatcacagtggggtaaacatggcggcaggaagctgagcgatcccacctttacctacaggcaggaagcagaaagaattgactggaagtgggatacagctataaagcctggaagcccacccacgctgacgtatttcctccagtaaggctacaccaactccccaaacagtgccacaaggtgggaaccaagtgttcaagttcaattaccaagcctatgagggacatttccaggcttggagacctaagaaaagacaattagaaagtaactaaaatacaccgaataaagccagagtctatgtctctataggcataagtaatttaggtaaatgaataagtaaatacatgaagttacatcaagcaaacttcttgaagaaatttcagataataaacataggaagactagtgggatttgaaaagacctttgtggataataaaagccaggagtcacatttgatgaggggcagaatatttacatattttagaagcattcctctatgcattagtgtttaattaccaaaggacaaatagtgactgctttgttggggatgcttggtggatgttgccttataaggaaataattagaacttacattgtcaggcctgggtcagactaatgtcacctgcctcttaataggttgtcctgagaaggacaggggtcagttcagtgctatttctgtgacaatgttgtgactgagaccttcagaggacatatcagaggcattcaggttgtggaacattctacagaatagcttgcctgctctcttccaaaacatcagggtggagcaacagagaaggaccaggaaactgttccacatgaaagggaactaaagagacataacaactaaatgcactctgtgttcctggactaggagagaaaatagctgaggacatgactggggcagttgacaaggctcagataggctgaggatcggacagttgtcagggagcaatgccagcatgcctgattataccacaggagactacctttacctttgtttgtttgtttgttttttgtttttgtttttccgagacagggtttctctgtgtagccctggctgtcctggaactcactttgtagaccaggctggccttgaactcagaaattcacctgcctctgcctcccaagtgctgggattaaaggcgtgagactacctttaccttaagaagtgtgtacttagccaggcagtgtgtgcttgaggccaaagaaacatgttgtcttgtattttctctcaaatattcactcagcacctgcatagcagtacatgttgtgtatatgtgtgtgcacatagaacaattaataagcaaatagggcaaaatggtgaccctgacgatgcagagtccttatttattcttgctacttttctaagcttggaattgtatgtttgttgttgttgttgggggttgtatatttgtttgtgtgtatgtgaaaaggaccgggtcacaggtagccctggctggtctcaaagttactagaaattagacaaagatcttgtactcacgatcctcctgcctccttgcctctcaagtgcagggaatcacaggctccatgcatgacactgatcatccggccatcctcctgccttagcttccagactactaggatatgagcgttatacttatttttgatagagaactattgaaaaccttctcttgagattgaggaacaaaacatgacagccagctctccagcttctatttaacttgctctggaggcctcaagtagcatacatagcaaagcaagacaaaagccagaaaggaagagtgacagctgtcagtcacaagggatatgattgcacagaagagccagaagattgtttataattgttagtgctgagtgactaactttgttaaggttcttaaatagcatcagttcacataatttgaccacatagctctataatagcaacaaagaggtaggtaggttggctggatagacagagataactaatgttagagaatagatactgggtgtgagagatggctctgtgctgtaggcacttgctgccaagcccaacaatctgactaaatctccggaacccacaagatagaagaagaaaacaaatgcctgcaaattgtcctttcgcctccatacctgctatggcttgtgtgcatctgaacacagatgcacatatacgtacaaatgtaaaagagagagagagagagagagagagagagaggaagagagagagagagagagagagagagagagagagagagagagagagagagagagagagaagagtacacgtcacagtaagaaatgaatgcatttcaggtatgtgcagtaacattgaagcacatgctgacaagagcctggtacagctgtcctctgagaggctctgccagagcctgaccagtacagatgtggatggtccatctcagccaaccatcagactgagcacggggaccccagtggaagagttagggaaaggactgaagggagctaaaggcaattgcaaccccataggaagaacaataatattagctagccggacccctccccccgccccaggactcccagggactaagccaccaaccaaagggagaggaactggtggctccagctgcatatgtggcaaagaattgccttatctggcatcaatgggaggggaggcccttggtcttgtgtaggctcgatgccccagcacggggagggggggtaggggtgggggtggagcagggatgctagggtggtgaggcaggagtgggtgggtgggtaggggagcacccttatataggcaggggactgagggatgggataggggggttgtggaggggaacctgggaaaggggaataacatttgaaatgtgaataaataaaataaccaataaaaaaataacactgactctcaagaacataataatgaaacatgaaataatcaaaatatattcttatagataagtaaaggttaaatagtagcacacaagtaatcattttattgctattttatttgctacattttccagatacctattttctatttggaagttaattttaaatcagtaagactctcatcacattgactgtaaggaatgttttaaatgcctctcaaagaaaactgagaaaacctatcatgccacacccatcaccccaaacaactagtgtacaagcatgcatgatggagtgaaaagttgtgttcaataccttgtgaggatgtgggtggtaggtcataaaaaagagcatacccataggcttacaactcgaaaatcacaggaggcaaatacaggcgtctgtggagcaaacatcgagaaggtgatttgtcgttgagggacctgaagtaatgcacaaaaaagcatggggctttaagcacagtgcacatttgcacagccctttcttcacagatgtgaggatctgctggcgtttcctctcagtaagcatgagctacatagatgaagaaggtaaaacatgatgctacagatgagagcaggagaacctgccccacccccaccccagggcctccattcagttatccacatgtttgctcagcgctcagtgtggcttacagaagctccgcagtgtgggggtggtagcatggggaccatgtacaaggtggcctgtttttcagtagcacacataattatacagcatcctgtgtactcaacacaccactcaagacccttggtaacaccaaaagaaacacccagaatatataacatgatttctatcccaccacaacctatcagactaggattaaaccccaggaacttatcaccatgcttttattggccgtgccccagccactgtgggcctgacaaggactctatcatagctgcctctgtgtcctcatagtggagcagagagcgctctcagctcatgtgcctcttattaaaaggtgccagggcagtgtgataatcccacggggctctgttcccaccccgatgacccccttggcctatcattatgccattctaagttcaaatgctgtcagtgtctgagtttgaggcagacacactgcagtctgtggtaccctcttttagctcccttcctcattgagaagcactgtattaaagggatgaagggggtctggaaagaagaaattttgagactaagtgagaagctcagggcagttgtggggagagacaccagggactgctgggtgtagagaagataaaggggggggggcaaaaaacagatgttgctgcaaattgtgggtttactaccatggctgttctggaaaaaagaatagagtgaagaatcttatttttgacctgggggctgtgtaccttcaaccacattattcttgggaggctgaccttgcaggccctggatttaacggttacacagtaatagttactggtacatagagtccagtgaccagagaccccactgacaggcatagatggaaccttggtgtgtatggagaaacacatcagaatggacaaaccccaagcttggcctggaggcacacacacaccgttagtcccagcacttgagaggcagacacagaacctaggaccactggagcaaggacaacatcacccacagtgggctgagcactttcccatcaattactaattaaaggtttccttacagccaattcttagggaggcattttctcaattgaggttccctcctttcagattactctagcctatgtcaagttgacataaaattagccagcacacactgtctcaagaaaacaaaacaagaatatatataaaaaaacatattaccacaccttagtgtctcaggcttgattaattttatgtcctggacctcagttcttaccctgtcctggacttgtcccaagttaggaccaagcagagaggtcactgggaaatggcaaagggatttcataggcagatctggagttgggggcacatccttgtaatcccagtacttagtactgtagagacaggattgcctgaaccatgtgtggattccctatctcaaaaacaacagcaaaaaatcatttacatcccaagctatggatgaattcctaaccttaatatgcaaatttctacttagtagagggtctactttattgactttagagggtctactttattgactgtaggcaggggacttaaatacagccatttctttcccatgctaactggctgctaccaggagagccaggtttgaggagccatagatatggaatctgctgagaagtcaggaggcaagaaagggcagtgggtgggatggagggccctctgggatgaggctgaaccattgccccctgtcctcatggaagacctaaatctgctccagggcagggtctaggatgacaccttgttattcatttatttataaatatttaaataaatattcattgtacttatgctgggagtcaaacccacgaccttgggcgtgctttaggaaagtgcccagttgaactacaatccccaactctggggccgctcatgtaagctgatggagccatgagaagaatcgtcttcctgtcagtgggctttgaggagtgtctgccatgctaaagaggcaggggtaactgttgtagggaacttatgctccttctctgttgccgtggtaacaaactgccccaagctggctgggttaaacaacacacatttgttgttttacatctagaaattaaaactgcaaaatcaagttttatggtgctaaaaccaaggtgtcaagcctcggggtcacatgggggttattttggtggttctgagctcatgacaaagcctgttttgttcccagcataagctcctggtttacaaggcactgttctgagcatgacatacctgaggccagggcctggaagtgtcagctgggatggggtctgtggggcatttccctggtattttggcccctgagtcggcggggcttgttataccaagaagctgctggacagccagccctgctgtgctgagcctttccaaaaaggtattttcggggacattggcaaggcaggctatgagcttatctatcgtctgagtgcatcctcacccaggtcttctgagaagctgaaatctgtacagatagaggaagacaaagccctgtttgtaaggcctcttggccatgggacgcatctgagcccccttctctagcacagtctcccatgagagctctttaccctcagagtgctagcctcagcagtgatacctgcctcctggcccagctccagttggaggctttgccttgtgcccatgtccagaaaggaggcagtctgcccgcaattgggtttggaagtatccattccctacactgtgaagttgaaaggtacacagtacaaggtatgtgatgtgagggcagtgtgtgctgactgtgggttcttggggatatgtacagtgctttgacttgtaaccacacacagtgtagaggggttgggagagcaaggcttgggagacagggggcaggcagagagagggtggttatccagcttcatctgtctctggatggtgactccatgcccctctgatgtccgcttgtctcagggtctcctcctctgactctgatgctcctcctcccttgaggacgaccttgtgatgatactggatactggtggccatctctctagctctagatccttcataatcactctgtagagtcctttttcttcacaaggaaccacacatagagcttcaggcatcggtcatgatacctgtgggcagcattctacccattagagagctgcattctgagctctgtcacccctctgtcctggagtatacttgcttttccctcgcatgtccttctcatgtgtccaccaactattaattaatttgttaattaataaaatgctgcatactgtggcgacagatgtcaggaatgagctcattgtgtccttttcctatggctcatcagaacatggctgtgagcaaggaactgagggtttgggtttctgcggccattcctcaccctctgttggtgcaaactcagcctgtttcctccctagccctgtcagactgtagctcagaatctagaccaataaagggtgcaagtcttcctccatcccttgacacgccccccccccccaagctgagaggtctattcagaacactgttctttcagggaggtgcctaggagatgagcagcaacagaggtcggtttcctgaggcttcctgaatagagagatagatagatatgaccagaaaagtcggagctggaagtccaggcccagcagcctggtcctgcttgctggtgcttctcgttcatagcactgggaaggaggaggtagcatcatttctggaaaaggtcccttgtaatggtcaattgaagagaatatgaggttatttagatttgtgtatgtggtatgtgtgtaaatgtgcatgcattttgtttgtgtgcacgtgtgtgtgtgtgtgtgtgtgtgtgtgtgtgtgtgtgtgtgttcatatagaggccagaggtcaatatcttgtatcttcctcaattgctctctgacccagcacggctggttagccaggaagctccttggatctgcttctctccctgagctctgggattacagctatgtaccaccttgcccagctctctatgtgggtgctctagatactcatgtttacacagcaatcacacttactgactgagccatctgcccagcccaggctctaggaagagcttgatggaaagaaaggtattgagctagtgtgaagggaagctcactgtggctcgtggtgtgcaggcgtcagcctggtgcttggaccccattgcttttcacattagttctcttgggagaaataaacaaaacaactttaaccaactaaacaaacaaacaaacaaaacccaaatgtcagacccacacagatcctagcctggatcctcatctgacctctcagaagggaaaatctggcatgtccaggtctgggcactgcccactgaggttccaggcccttgtaatcccaggtaatggggtaggactctatgccaggttgtattagtgttaatggacaaaatgtacagagtccagtgtatgacctgtgcccatctgactatcacccccagcctgtggacctctgcactgggtataaaccttggtctagctgctggcaagaagctgctgggctccccagcatgtgggcactttgagctttggtggcttggtggagggtgtgggggttactgtgctctgagtggaatcactaacctcaggtctgaaagtcacctgcaatatagaggctccactggaagggacagagctctctctcaggaaccctggtaatcctgtgcatcttgggtagtttaattatcaaactgacctagtgtacgatcctgagaagaatgtatcgatgagagattggccaggtcaggttggcaggtgtcagggattgtgtttgccttcactgatgtgggaagacagcctgaaaggggacagggccatttcctggcttgtggccctggactatgtaagggtagagaaagctactcagacaccaggcatgtgtttgtccttttctctgttgcttgactgtggatgtgacaagattagctgtttgaagtcttggcttaatgatacctccctgctgtgatggactgtgatcccagaactgtgagctgaaataaatcctccccctacccccacccccgtaagctgtttcttgtcagagtatgctgccacagcagcagaagtgaagctagacccctgggcacaggagagatccaaccccagggctgagaacaattctgtctgattgtatgcttctctggccggcaggtgccatatgcttagcttaactggctatttcattactttgctcttcatgattctgaaacttgtgcccagcacgtgactatgtatctcatgacttacatcacacatgaccatgaatgttggccacatatgtcgaatgaagcatacagatgcttggccagagcctggattcctgcatgcataatgccttgaacttactgtcccttggaaatcaagtgtgagcagaagtgcccctgcctctctcacagtcctgtgaaaggccctgccctgcccacttccccaccacatactcttcccgcaaagtgtctgagatgctaacatgcagcattttctctgaactggtttccttagaagctcactcagggttttacagcaccctagggtgtctccagtcctcttaggggctggtaaaggattctcaacatcatttgcttccaatagaaaaaacagaatctgtgcgatacagcagttttagccgcattgggagaatcacgggatataatgtgccaccaaggcgactgggtgtcacactctgagagctagcactagctgccctaggagaagaaatggctttccaaagctggaatgttcgtaaaggggtttaggctggataggggctcgggccacagttccaaccacacagaattgttttttctttttcacaaatacttgtctttcgtttctgtttttatagaaatatatatccttgcaggtgaagagtgttattaaaaacaaaatccaacagaggtctgaccactaagccttgggaagtgagtccttagagacaaggatatcgccatttggtgttggaaagatggctaaacagttaagagtgtttaccagtcttacagatgacttcctcgtctccctgcacccacatcaggtggcttataactgcctgtaactctagctccaggggatccaacaccctcttctgacctccagggcacctgcactcatgtgcacatccttaaacacagaagcacacatgtgcacataattttaaaaataaaatgagctgtgtagtgtgagacttatatgtttaatcctagcacttgggaggcagaagcagctgaatctctgtaagttcaaggccagcctggtctacatagcaagttgcatgccaaccaggctacattttgagactatgtctcaaaagcaaaaggttaaagtttttagttttttaaacacaaatatttttgcttaaaatttgtttaaattttcatttaaaattttaaaaacttttaaagtcaccatctgctaaacccttgtgttgacaaatgtgctcggaaccagacattcttagcttgggttacacgctttccagctacttaacttggcacaggagaagcagctggccttagttttcccatctgtgaaatggtgacaggggtggtacatctctcacaaaggtagaggagtgaatgaaccagtctttatagacgtgtgaggacaaaacttggcacattgcataggcgtgtgcttgctgatgtgctgagcacacatgtggaccaaggtgagtgggtgctagccaagtgagttcatgtccagagaggaaggcagagggacccgagtgcagtgccgtatggaacactcgttcctcacagagccatgcagggactcttaattaaaacatagattccactgctggctcttgttgttaatatttagggcgagtcatttatctccctctgccttggggtatttgtagggaatgctgggttacagtgacaaataggcttcataatttcagtggcttagcacagtacaactttatttcctgctctaggacaaatgcctggcaggtgtttaggtcacagaggtagctgccctccgcacggacactggggaccaggctgattctggcgttcagattcacactgggaatcgacatccttgtcctggtgggagagcatggaggtatgcccgcttgatgctaccaaagctgcacttagagacagcactcagcattaccatgatggctgttgggcatgatgatgtggctacatagaatggcaagcaatcctacatggtatctgtaatgtgtctgaggaagaccagaccttcctagatgtctccattcactccttcatataatcccaagtgatgttccctgccatcctgactgacaaaggattatcagggaatctatgtgctataagaggtgccaagccacctgagccagaaagaaccatgcaggtttggcaggagtgtttgtcattgtctggatatactagctttggctcaggagagtcaggtggggacctgctggcatataggcatcacccctttaagtgtttcctgactgagtcagttcagctcaaccagtcttcacataggagaagttcttcaaccttccctgggtgccagagacctagaagtgccatgacaagcctgataaactctaccggggtgtgggggaggggagcaggtatgaagtagaatgactgtacagtacgaatgggtgcacactgaattcagaccaggggatcatgaccatgatcatgttcttctcaagaacagaaggaatttcccctgctaaaggaaacttagcagcctatgaagttccagggggagtaagagtttgagaaactgaaacttggtgtggccaaatcctggttagagaaagccaagggccagagtggttggcagacagtgcaaagttttggaggctactgtaaagagtcatggaagagcctaccttcccatgggaaagatggctgttttctggagccatggtgatatatatttaaagctcttgctgaagcatctcatctacagccaattccatctgttccaccatgtgcgtcattaaccaagtccctgagcatgataggcggataccaggaaaggctgtgctctgtgcttggactaaatctaattgacaaaggtcaccctcgtcctcagcacacaccatttatttaggaggaactgagctcatgaggtatgtgtcttcatagactcataggtggatttagtgcttcttaggagtgggaggtatggcccaagcctggcctaggctgcagggccaaaaggctggctgctaactgcatacttggaggttatggtcttacgggatcatgtctctgtgtcttcaaatctagtcctgggtgtttaacagaattgtcagtcaagaatgctcaaaacctcagccaggaatgcaataaacacacacacattctctctttctctctctctctctctctctctctctctctctctctctgtgtgtgtgtgtgtgtgtgtatcgcgcgcacaaatgcatgtgcatacaaaagagatagagatacagagtgagagaaatagagaagtgggggtgacaagctaaagcatgttagaactggccctggtggccccacctgctttgggggtgaatccttttgctcagaagtcatttcaggtgacagtgacccaactctgaaacatctagctgcgttgatcttcctggaaccatgactaatttttgattctctggttccatacaccaggcattagccaaagtaccaaaatacaccctcaatttgcagagaagtggaagatgttcaaacacagaatcaaaataaaggatgatttttcatccatccccaaagcctttcattttccagcagcacagaaacagagtgggtggcagcaaggacatgtggggactgcagatcagtgcattagtggtcttctggaaaggacagcacacacggatgagctgctctgggcacggaggctcagtcaggattcatctctgcccagcccagcttgatgtagtcaagagaactgcagaaacaaaaggaagccatgggctcctcatccatctgagctcagcaaagaaaagctccgctggcccactggctcccacccgttgcacatctgggttggccaagaaactctgtgcctcctcctctctcgtctctcactttgcctatgggtttggggttgacgtctatgtggtgaggcagttctcacggacctcagtggctggcaggaaccgtggggggaagctgcagtagtttctgccccaacttcaaggttgacctatacccaaccttcctagggatgcatctctcccagcccctcccagcctttcctgctttctggctgcctgtttggatgtgttccctctgaagttcctatattagaagcctaacccacagggcagtagtgttgagatcggggctgtgagaggtaaacatatcaagggggcctacaactccagccaactgttgaggtgctacgtctcgctgtgatctttggcagagtccaaagaccatgaaagagatcacatagcaagagaccagtctgtccgcttataaagctgccaggattcactcatgagggcaatactctgatgatgatattccaaccccttcccaatggcccaaacactaaaccctttacctgaatcaagattctctcgtgtctcacaagggagattaaatggcggtacagaaagccttgggagacatactcaaaccttatctaaatcagcagtgtttatttattaaatcagcaacactcattcatgtatgtatttgatcctttttaaaacaggctcttactgccaggcgcggtggtgcacgcctttaatcccagcactcgggaggcagaggcaggcggatttctgagttcgaggccagcctaatctacaaagtgagttccaggacagtcagggctatacagagaaaccctgtctcgaaaaaccaaccaaacaaacaaacaaacaaaaaagccaggttcttattatgaagtccaagctggcctcctgcttgctgtgtagcccagactgacttccaatcctcttcagtcttcttgtcttatttttctagttctgggattataaacatacaccaccacattgggcttccatgttgcactttaattagtagatcattgccaggattcaaaaacgtttttggtttttgtttgtttgtttgttttattttgctttgtttttgttttgtaaaaaatgtgatttttttttttttctcttcagaatcttctctgtggctggctcataattggtgctcagtagataccgattgaagtactggtgtaaaacatgatgttttctcagccctttggtcccggcatggtacagagcctgaaatatgcacataactaacaagtctatgtcatatgtcagtaagtgctgcacacgcccgaggatccgaattctaatctccagcccccacataaaagctgggcatgctggcacgtctccagcccttgtaccacgaggagtggagacagctggcttcgccctatccccatggcttctcagtctatccaaatccacaaaccccaggttcagttggagactctgtctcaagaaactgggtggagtgcaaatgaaagcatcctgacatcggcttctggcctcacacgcatgcacacacaaaataaatgattttaaaaagtggggaattctgtctcttctgatgggggaggtaggtaaactggggttccaagagacagcatggctttccagattctcctggcgctctactgatggctgaatgtcctctgaccctggtcatgccaaggctggacttcacccatgaataacaaggggttattcatgggtcctgtgatctctggagttctccatgctattattaccattccctgaagaggttaactccaacaggtgctctttagctggctattacgcagctgagacacagctccttgttagtgagaatggactctgtcgagaccacaatgcttgcctattattatttgcgagtctcaggagaatggagacccagaggctgctgaagatgagtaggaaatgcccaccccctccccagcaagtggaaaagccatggacccatagctgagaagtctcactgagcagggcattgtcaatggctgctaatttagcttgctctgattctcccttaagcagctcttctctcgtactgaaggaggggaaagctgccattgagtggagctctgttctgccccgccagcctgacatgcacaagggcagtgcagaggagggcccagccctcctggaggaccgaacgtcaggatctgctctcagccagctctgtgtaggatacaatgtctgtaatgagctaatgcacacagagatgggaataaccaacaagcatcatttgcatttttaaccaaagggatgcataatttatgaaagtccttcagacatcaagccaacataaccaccctgggcctgtctgctggaacagtggaaaggccggagcatccgtgggttcaaaagagtccatggagcagagtgacaaggcaaagtttcagaggcctttttgatccatggagttagtggttgtgcctcttctcaaagactccttaacaaaatcgttcataggcagactagcaagatgtagtggttccaagcagtttcaagaggaccaagtccagggaggtcaagctcagtccagaaaggtgaattcgccaatgggtccagattgggggctcaggtgggctatgccctccacaagatgagtcaggtaggtgtgcgtggagacttgtggagcttgtgtcttcaatgtgaccttcctatttccagctccctacatctgaccccactgctgaagcatataactggccttgggagatgtttctggagggttctctgtgagatgattatgggtcaaagagatgtgggtaggtgtaaggtccagggtactcctgttgctgctgctctctgagttacaatcatcccatcagctccttggggcggatcctactctgatttctttctattgcatagacaggttgtgacagtgtcccttcatctttcagcactgtgaaacctctatcttcagactttggagactcccgaggacaatagggaatttcttctttaaccctagatgtcctccaatcgcatttaggacaaaatccactttttgtctgtagccacagtctaccctctgctgtccctgcccccagatccctgtgctccacgggcactggctctctgtcttactacctttcaggtacaacaaactcatcctaccttggacctttgcttagacctggatggtctgctctcaagcttgccatggctgctgctctctcaatgtctggtgttcatgcagatggcaactccccagagagatgaccactgagtatcccatgttacagggctcccgcttcctctagccagcacctcacagcaaatcttattatctgaactagaaatatttgctgctcgctccagtgagcatcaagaaatgtacatctgacttggcgagcgctgaatctcaggggccgggatgctgatctcgggtgaaggggtcacttgccacttactgagcgcctattgtgtatgtggctctgtttgtggtttatttagtcgctcaccacaccaattccatgtagtggtgctgttgccctcactttacatgcaggaaaatgaaagcttaggttaaagttgagtgagagtttagacccaggtatgcatgacctgggagtcctcacacgtactctaaagaacaaatgaaaagtttaatattgttatctactgcccaacttccagcatctgtgactcctggccttcccattattctccacccacccagctccagccatggatgcagagccataaagatgtctcctgtgaatcctgtattagcctacaggctgctacatcaaaattccatgggctgagtagattaaacaacgggaaagctttttttttttttttttcacgattttggatgctacacgtatgagatcacagagtgaaaggattggttctgctttcttctcaggtccacaatatcccttcattgctttaatgcatgtagcctttccattgtagacacaaagggggtttagtgcctcttgttactggggcactgacttattagagcagggcccatcttaatgtcaccattaaatcttacttgcctctcggaaagccatattccaaatgcagtcatattggatgctagccattcaacactggaacttgggaaaagacacagatgaccctagggcatgtcaatcataccagattgtgtttgtttgtttgtttgttttcttgttgctgcaacaaaatacctggcagaaaccacctaaagggattacgtgtttattttggcctgcaatttgtaggtacttcccatcctggtggcgaaggcatggcagcaggagcttgaagtggctggtcacatctcaaccataatcaggaagtagagaagcaaaaaagtagtgctctcttggacattcttagttatgtctaatctgggacaccccccccccaacctaatgagtagggtcctgggtgagcctccaacctcaactaacttaatccagataatctatgacagacacaggcagaggcttgttgcctaagtggctctagagtctgtcaagttgaccgtgttacctctcatcacactgaccgattatggtagcaaaaataatagttgccaataagtgctcgaagcgttaatgaagatagaaactttgagtttgggatcattggctcaatgtgctgtgtatgctctcttaatggtgaaagtggcctttggaatggattctggatgcccctattgaagcctcttggctccaaagggccaccggggcaggcagatgttaagaatgtgtcaattagataatcaattagcttaatttcaaagtggcaaccagggaaagatgcttctgaaattgtttagtctgcaagtcacatcagagagacatctgcgtcagcattatatcatgtcccagcctccagagtttaggcaggatatgagaaatctggaagaggtccagaaataaacaaggctggatgaaggggatgaaaatgatgctctgaggaaaggtgataagaggtgtgtgtgtgtgtgtgtgtgtgtgtgtgtgtgtatgtgtttgtgtgtgtgtgtgtgggggggaggttattgtttcaaatcccagggcctatgagagtttggcaaataggtaatttacttttttttagggggttaaaggaagaatgctgaccagttggtggtgttttttttttttttttttttttttttttttttttttcagaaaacttaatagaaatcttgggctccagcccagcaaaagagccagtggtacagggtacaaattaaccatcatttagatttttagcgtgactcaagactcaattggccagcaaaggaattgcatgctatggtcttgtcctggtagctccttgccttgaaaggttaacatgcaaagagattccagattctgtcttcccaggtggaatttctgccccacatggataatttcccttacagctctatgtccttggggtgaactctagagaccccaggaattatgttttgcacagtgtccccagagttgctacatcttcaacattagaagaacttgacctgagctggggagactggggatgccgctcagtttgtaaagtatttgcctagcatgtaagaggccctgcgtttaatcccagactacagaaatgggccaggattagttcacacttagaatcccagcacttgggaaatggaggctgggagattagaagttcagagttcaaaaccagccttggtttacaggaaactgagtgggtgggcaagtggggggatgaatacaaatgagtctgctattgtggctgcacctcccagcactctcagcatcttgcagtactgggagaggatgcacagtttctccttgacaccctcggtagtctgtcagatccccccgaagttctagaaaacttgactgtggccaaaccaggctttgtagcttggtaaatgtgaaaagaattttgggactagctagtttagagagcacgattggagatgttattagtaaaggctcaatcacaaggattgggaggaaaggcggtgctcagaaacaaacaatacacacctaagtgtgactcaggcttctcaagagaaagccgcagctcattgtttttttataatggccgtatgtggcatttgggtggggtttaaagctactgttttaccactgagtagttgggggagaggcacctgacaggtagtctttgataagaccaactctagtccttcgagtttagggtcgcaggatagaattgctgtaaacatagttgagttttgtttgataatgaggcaatgtctttggaaaggaacgaggccccatccaaggcccaccgtcacacacagtcaggctttaagcctggtttgctatttgaccacatgatatctatccgtgacaggaaccttagttttgccttggcagcaggagttagctgggttggagttcttctcagctggtgagaggcttctatcagactccaggaggagggcctcctctccctctcatgcctccatgacttccacctgtctgagcttctctcctcttgggctaacaacactaagtccacctacctgaaggcaggagatcacagctgacatggtcagaatgtcagagggacctcacttgtaagtaatgggtacagtacctcacctgctcatagagcctcacctcaaaagagagttgactaaaagccctcactaagacatcgtaggcaaatagagagttaacaggatccctctctgggagttaatttagaaagagtcttataggataatgggcaataaatgggaaaggaaataatgtttctagagactcatttttcttttaaaatgtagcagatttatcaaagagacacaattgtttctactatatcattcaattcagtgactccacaaagatgtctttatcaaattcgagctcatttatttttctccattgacagataaaattgcatgtgtttctcatgtataacatgatgcctgaaggcatacgtgtattggagcgatgtctagctagagcctcccgtagtcaacacacttgtgtgagaacattgaatgtccactctcttagcattcctcaacatctacttctgaaacccatcttgaggccaggcatgtgcacagaaggtgtgtaacacactgtaccaaggtcctgcctttgtgaggcctgtaatttccatcagatgagattctccgcagccgaggaccacccagctgttctcagtaaggaggaaatgacttccacttgggaagtacagtggcccctggctctctgtgatcactgtgctggatgcagaaataaccggtgaaagcaaaggatgatcacacccacatgcttcaacccaatccatgaggttttctcagctggatcagcttgggtcttggccttgaacacctaactaaacagagacgggaaagctgtcctcaagggtaggggtgggcaccactctgcttcactgatggggcagatcaggggtaatttcattgaagccatcaggaaacacccaccctagcaaaaagtagtgggttttagatagcaagaaaatagatctacacttccttagtatcttaattagggtcttactgctatgaagagataccatgaccaatgcaagtcttataaagtacaacatctaattggggctggcttacaggttcagagattcagtccattatcatcaaggtgagaacatggcagcacccaggcaggcatgaggttcctctcaggaggagctgagagttctacaacttcatctaaaggctgctaacagaatactggcttcaggcagctaggctgaggttcttaaggcctacacccacagtgacacacctactctaacaaggccacacatcctaaaagtgccactccctgggctgagcatatacaaaccatcacactcagctagaaagggtcagctgttagtgcagggatttggagcccaggcctgccctgggcagtgtctcttcagagattatcaaaggcagtatgtcctgatcctccttgccgaaacaacctttcacctctacattctctcttccagagggcagatgcatcatctcctcccctcagaactcatcacattcgcctttggtcctcagcaccccattggttctgtgttttccaaaatggaaaaagctgtgcatacaagacacaggcacaaacacatacacagtataggtgagtgttcataaaaagaaaaaattaaagtccatttcctgagatattcccaccctgccctgcccctgaccaatgcagaagccgagtaccaccctctgagcagaagtgcagtgcagaaaaacattcttttgtctcttcctagagaaccactttcccagggtgtctcagttaccttttgtcattgtgacaaagtatgagaggaaacagactttacggtgaaagatttactgtgactccaagtttcttttttccatttatttatttattcattcattcatttactttatatcctgattgcagcccccttctcctcccagtgtcccctcacacagcccctcctcctactcctcgacttcacctctgagaaagggtaggtctgccccctgagtaccgacctaccctggcacttcaagtcactgcaggactaggcacattccctcccactgaggccagaataggcagcccagttaggggaacagattcacaggcacgcaacagagtcagagttaacccctgctccagttgttgggggacccacatgaagaccaaactgcacatctgctacatatgtgttggaaggcttaagtccagtccttgtatgctctttggttagtggttcagtctctgtgatctcctaagggtccaggttagttgactctgttggtcttcttgtggagtccctccctgtgccctctgggttcctcaatcctttctccagctcttccataagacttcctaagctctgtctaacgtttggttgcgggtctctgttttggtcagctgctggatggagcctctcagaggacagttatgttaggctcctgtctgtgaaaccaggctgacagatacaaacataggctgagtctcccgctccaagtttcttaggtttcacccccgaagtcacccagattcactggtttgggcttacagtagggcagaatgtcacagtgggcaggagtgtggaggctgcagcctggtagtagaaatccagagagaagagaccaagggcaagataaagctttcaggctctctgagatctgcttcctccctacaggccccacctgccacagtttccaccaccgctccactgctctgttcaataacgaatctattaatgtgtcaattattgattagttgaaccagtcactgtctaagtccccagcaggaatgttgctatggttatccagctcttacctgtctttgggatgggggagacagttttattttcacttgcagataaagttgcatgcatttcccattcctgccccgtgcctttgggcacgtaggcattatgaggtgcttgcatctgctcagggcctctcacaaccctggagtccccctcttagttctcctcacaacactctgcacatgttcacagtgctgctccgaggaagggtgggttgcgctcaggctgtttcctgggttgtaggatgagcagggatgcccctctcgatgtgtccccttcttcttttgacactggacctgcccatcttcacacactcttctccccaaatcttgcattttttttctatatataggaaatacaaccctgatgccaaaagaaaaagaaggcaggcagggagagaaaaggaagaaggccaataaaacggggaacggggaatcctagcaatagaagcccatgcttctgcccccagggctcttatgttcatacttttcaacactgagcctagggctacgttaacatcttgtgtataccaagtaatttcatgtgtgtgtgtgtgtgtgtgtgtgtgcgcgcgcgcgtgtgtgcgcgtgcgcgcccgcgcaggagagaggaagagagagagagagggagggaggatgtgcgtgcatgtgtatgcatgtgtaaaattgactcccagtttcctctatcccctcgttaaagctaacacctacctatcctgcctaaatattataattagacctcaaatgaagtgcatgtggccgacagggttgaaggctccacgttcctgttctctgagaaggagatctcagggatgacttgttttgaattctcactcctcttaaggctgaaatgattcctgttaaacaacaaaaatttctatgaaagacatctcgctgggaaaggcgggataatgtctggttggaaaagcatagttagttcttgtatggaaagtgtcagcggggcccaggcactgttattactgctattacccttctctgaaaggcgtgaagcagctctgccagtggaaatagaatgcaacccttggggttcccctctgtattgatagattggggtagcagaccaggagaagcaccccactcatacaggccctcacccagcacctgcttcgtgaggctagctcagtgccttaccaggtgacaggtgccagggtaggagcagagggtgggctctgtgtctagaatatttggaaaagagctatctatatgggcagaggctagtggccagctcctgtgtctgagaaacagtgggtatattctggcttacaaggcaaaagccctggtgaggaaatgggctgtaggccttaacaacaatcagaacaaattgtagcatttgggaagctctgtgggcagcattcaatgttagggatcagcaattgaagcttaggggccagaagcaggaggagagccccatctttgctcaggggacatttgtcccacctaacacatgagcctagaattccaggcttttctacaaatgtttcctttcttctaggcattagtactttgaaatagaataatccagcctcactgaattatatgactcaaagaagcacaccatacaaagattattgttagtgttgttcctttgttatctggctttgggaaaggtcatagtctcagttccattccctgtgactggaataaaatactctgacaaaagcaacttgagggagaagggcgcatagctcaaagacagaacccttcatgatgtagaagtcacagtagcaggagcttgaaacaactgtccacatcacatatacaatcaagaggcagagaaagactctttctccatgtacacagtccaggaccccagccagggaatgatgccacccatggtgggcaggtcttcctatatcagttaaggcaattaagttaatgccccaaaggcatacctacaagctggtctgccaggtgagagtaggttctgttaagttgacagcactaactataatagtcatcaattcagcaaatacatcaaagaacacagaaatctcttagaattactatccaaatatcatcatctacacatcactgaacaattccaggcttttcttttacacccaaattaagaaaaaaaaataaaaacacaaacaagcaagcatttagtatcttatatagttcttacttctttgtctatgtattcctaagtttttctttaacatgatcaccatgctgttaacatttagagaacatagccagaactttagacctttaaaagcatagtgtccaattgctattttgaaagggtatttcagctcacatccccaccagaaatgagagctaatgtctcctccccaccacagaagctaggtattagcatttctaaaaaatcactactaattcaataatatcgaaacagtatttcattgtttcaatttgcctttctttgattattgatggtgatgaccatgttttcatctgtttattgggacctgtattgattttttggtagctagtcttttttttctgttgatgtatttcttctttttcactattgatttgtaagataacatttttttatctattaaagacttagcttttcagcacccattttgcaaatatttttcaacttttaattggtcttctatttgtggcacatggttacagaagagttattttctttctgttgtttaacaaaagttttcagttttttcagtataatatttgaatttatttatatactttagaagtgctttccaaattgcatgcctacagtccagcatctggaaggctgaggcaggagactcaagagttcaatgttataccgggccatatagacagagcttgtcttaaaaatcaaaaccccaaaccatggccatgccatggtcacaatattattataacctaagtcattattataatgtaagccaagcattattctgtgtattaaatatgaaagtcagtaaattttgagtaaagcagattactctttgtgtgaatgggtattgtcccattagttggagactttaatagaaacataaactgatctcagacaagagatacagctcagtggccaaagtgtttgctatgaaagtccaagggcctgcatttgggtcctcaacatagttgtgaaagctagtgtaatgggtacagatctgtaatcccaatgttgggcaggaaaagggtttggggatagagaccaataaacacagggggaaccactggtaagccatcctagcagaagcagcagggtctaggctcagtgaaagagcacctgactcaaaaccataagatggagaatgcctggggaggaaactccgcttccacatgtacaggtgagctcacccacacccatgcgcacggacacacaaagaagaggaaacgaggactgatgaatctcacccgaggaagagagaagtctgccagcagacagttctggattgagctggaccatcaggtcttcctcagatcgccatgccagtctacctggtggatgtcaaccgcctgcttctgtcatcatgtgaaatagttctgcagcatagatccagcctctgtttcaaccccagctctcaagccacctctcgccacagaaatccatgtgcgattggatctgtgtctgtagactcctcactcatgcccaaaccaaaggttatacatttatctatataatttcttgtgtttattattttttgatatggtggtaattgaatccagaaccttgtacatgacagacaagtactctactagtgaattacacctcagcccttacctatatctcctcttagcactaacgtcattttgtccattgttttccagatcatcaagcattgaacatttgctgtcagggattttaatcatttgattgttttgtggggtgaactaggttcgctggcatctttcaacctagatgcatttgaatttaaaataattttatcatgttccacaaaggaatatcattggagattaactagcattgctttaatgatgtgtgtgtgtgtgtgtgtgtgtgtgtgtgtgtgtgagagagagagagagagagagagagagagagagagagtcagtctgttcatttctttccctttgctgtgacaaaatacccagacaagaaatcagttagaagagaaagggtttattgtgactgatagttcagaggggtacagtccatcaaggtgtggaaagcatgtgagactggctcagcagtcagtctcacatttcctccacacaggaaacaggatgggggagggggtggcagggaatggatcagactctaaaacttcaaagcccacccccagcagggtacttctccagcaaggctccaactcctaaaggttcctttggtggtttcaatatgctttggcccatgggaagtgctgtggttaggaggtgtggccttgttggaggaagtacatcactgtagaggtaggctttgagatcctatgctcaagttctgcctagtatggaaagagaacctcctcctggttgcctgcagaggtcagtctccttctggctccctgtggatcgagatgtagaactctcaaccccttctgcagcactgggcctgcctgcatgataatggactgaacctctaaaactgtaagccagactcaattcttatacgagatgccttggttatggtatttcttcacagcaatggaaaccctaactaagacagttccatagccagtcaccagctgaagagcaagtgttaaaacacatgagcctgtggggggggtgcactcctcattcaaacaaccgcaaggttataggtggagagaattcaactctgcatgcctctgagttgtcccatttagggacatagactctccatttatttgcatttttctcagcactcttgtcctttattctgcgtacttcactggtaggttttactttgggtacatttggaattttcagctgtcatattttgtctgttcatattgtcaacagagccttataaaattacagtctcttacaagttctaacattgttgtttggatcatagatttaccccaggagacagccatatctgccctctgttcttttgactattgattggttttctttcctaatttcaatgactagatgtctctagtttgctttctgttgctgtgactgaccaaaaacaccttagtgaggaaacaacaggttctggtccatcattgagggaagtcaggacagggatacaaggcaggaacctggagacaggaactggagtagaaaccatggaaaaaggttgcttgctggcttgctctccatggcttgctaatttgctttcttatactacccaggctcactgtccaggggtgacttcatcctcagtgggcttaacccacccacatccatcaagaattgttgcctacaggccaccctaatggaggcagcatctcaattctgagattccctcttccaaggttgacaaacatgaatggtaacactaggccttccaaaaacgaaagccaaggcacatgcgtttctgttctaagcattgcccattgggatgaggcaggttgttatttcttcctgaggaacgcactgggaatgatttttggatttggcctaacacctgtcccccagtggtccagaagaacttatgggtctctaactactgagacggtgtgctgacagagtcattacgtgtgaattctggtcagacatcctagtttctaattgtagagatctgggcagatttcttagcttatagtgtctgggtttcttcaccttttgaatttctcttcctccaattctcacatccattgaaactctaggatttgaatcacagtattcatttgaataaaccttagcatgttcccccactttccccccacatctaccaattcttactttctattattgtcattattgttacaagtttagggccaaataaatttaaaaacaaaaacaacctcttagtctttattttcaaaaagtgttggcagtttcttcactctgtaagcaagcacattacttatttagattttacctcttccttgctgagctgcttggtctgtggaggtttcccttccaggtgttcattttcttctcttgggttccgttaatcatctgtcccctgaagttctgaatcaggagcacttaagtgttattttagcccaaatgctgcagatctaagaatataacaacacttttgtatacaaaggacacctcccctcctataactcttacatagaattattttcccatttgaatatagatatcagtccattgtcttccagtgttttgtgttctgcagtagcagtctaagggagccctgattttgttccttctgcaaaataacaacacaatctctttgttcctttgtttccttgctaaattgctagaaccacttgttctttcttgttgttactgaagtgttttatttggataagtaagtatgggtttatgtcactcaacgtgttccacaataacgaatggaaagaaccttccaatggtgctctgctctttagggaagacatgttcttacttgtgacatctttgctcctgccttgcctgccatcacagtgaggacaaggactctcctacctgcccccatcttctcctctctttgctgcatttggggacagctttgagcagttgtcctctgtgtcactgatctagttttgcctgtgtctaggctgtgctttagtggctccacagcaatgggcaatgactattgcataagagcacttgtgcctcttgcagtgctccttgctctccaaccctcctcccccgtgctactctctccggctctgctgtttgtcctcttgtctcttcctcctcccctcaacagatgtcttctccccaacccatcccatctctctctctctctctctctctctctttagttttttgagacagggtatctctgtgtagccctggctgtcctggaactagctctgtagaccaggctggccttgaactcacagagatctgcctgcctctgcttcccaagtgctaggactaaaagtgaataccaccactgcaacattctccactgtgttgggggttcagaagttttcttaactttttcttcagatgctaaaatagatcactttcggaaagactcattgagctggcattttcttattctttgagcatggagtctagacctacccccaccctgttcttctgcctcagggcttactcctgaaggaagagattctcattcatgtggtcaaggtgcatgggcaccctcaatcttgccccctagacaaccaggatgcctactgggttcatattcgctaccctcctttccattggcattggaatgggacttctctcttaatgtgagacttttccaatgctgtgaacaataacagtagatcaaaaaaatggttcaaccctagtctagcttggttagccagtaaattcactgagagactgcttacaagaacatggaggggcccagtaataggagtgtggttgactcaaaggaaactacactgatgaaagggcctgagcaagactcacgggagtagcactcctggtgctcactgtaccgcttgcaggctgctccactggaaaccgtattctctccctagcaagtatttactgcccctgtggcctagagctggggtgcttgtgaatcttgtaactttctgtgtttctggagtcttaggaacctctgtcctccctccaggaggaaatgttttagtttacaggcaatggatatgtgttaccacatgccatccaatttacccaggtgcatccttcccttgtctcttccatgggcacaggacaggttacagttgacagtgtctcttcattggcatgaattcagggtgctatttcttgttctaggggtgactgttgctctctctgacaaaagagtatcatgtaacctttgtttgtatgaaataacaagtaatggatatttatggagagaaaaccatttccatcctgcttgggtctaaatgatgagaatgcatgtataccaaggagcaccatgctaatagctggggtgaagcatcaccaaaacaaactgacagttacagaagacaaggaacagaggagcaggcctcagggtggagggagaggagatggtagaaaacctcagtcagggcttggagaggcgcctcaacagtacgagcatatactgctcttgcagaggtcctgagttgacggttcacaatcatcggtgtaactacagctttaggggatctgacacccccttttggcctctatgggcaacagcattcacatgtgtgcgtgcacatcacctgagataaaagttgtataaaactacagctcacacacttcctggcttcacctctcattcaagcctccccttctggcagctcaggccatggaaaatcccttgtaaaacccactgcttttcttcctgagaagatgggcatttctaaatatatatatatgagagccaatgtacacatttatcttttagtggcatacgatacataatttataatgcagaggactgaaaaacacgcaagctgcctcaaatatcactcgccatatgtagaagcataattgaatgacatgcatcctaaaaatctgctgtgtgaaattctttgaaaacgtactcacatgattgcgttaagtccccgcttaaaaataatctgaaacattgcactgggttgttgttgagtttaagctccaagtctccaaattgttatgagattacaggccttcgcagaagcccgtagatccttggtaacacgctttgttaattaccagcattgtgtgtgtctgtgatgcccattgaggatctagaatagattaagattgaggacaaggaacgaggctgctgtatttgtgcggttcccccttctgctcctcaatggctgccaacattacagtagctttatcgcacccagagcccctctaaggaaaactgtctcagcctcagacctagccgaaaattatctgtgtgctcatcacggagctttgctacaagttagattgctcagcagagagaagaggggaccccggtgggagtcatggtgtggttcattgatgctgagaaaaaagctgaggctgaggctgacatgggcagagcaggtcccgcaggcttcagaccctggagagaccaacagctctgctcagcgtgagtcctcagagatgccctgcatggaccttattgccaccatcagacactgggggtgactgtggggggtagcctgagggagcagcaaggtcagcaggggccttacacaacagcacgcggcgggcgggaagctctgactttgggtagagccataatactagaactagagccaaagtggttactcccaggttccagtgctcaaacagctcccctgccatgcgtgctcatcctggcagggcactgctaggctccatcttcacttctcctaccacatccgttccagctaccaatgtaccctctgccccatctctttacatcacagcctctgagtacccagggcagatgttttctgtgtcccctctgatacctggctacctcaaggaccatccttggagcttccttttagtttcaattctgggaaaaaactggttaaatttgccgtttggattttggtttttgaagtttaatgtaagacactgattctaactggctttgctcacttttggtaatgtgtcactaaagagtctttgaattttcctcccctgcatagagagtaagccctgttccagctagctggttcaccatgggcagtcacgaggcacaaaaatggctgcttgagccatcctttaagctgattctgtccctgaggtggttttccttagagggaactgcaaatacggtagaaactactgtaatgtcttcaaccactgagagcacggaggagctccacgcgaacataggaaccttgtgtcttgtcctcggcttcttcaagtctgtaccaagggtgctcatgcgcgtcagtgcagggttcttggaatgcgggggagccatcacatctgagatggtttgagtatgaagtgcccacacagacacgtatgctgatagcttgattccaagctggtggtgccactttggatgattctagaaaccttaggagatgtggcttagcgagagaaagtaggtcactgagtgggggttgtccttgaatatttttccttggcccttcctgtctgcttctgcttcctggatgctatttgatgagtaagctctttcaccacacatttcctccaccgccatgctcagcccaagcccacaaagccaagtgactgtgaactgaaccctctgaaacagtgagcctaaataagtccctcctgccccgagatgttcctgctcagtagtctctcccagtgataagcaagctaatgcagcatcctactctagggactcaagcccttacaggccacttacactgcaagagatgccagcctaggtggagatggtccagaggagcctgaactaaagctggtttggcaaagcatgaggcatccttgactatgagacattctatggtcatgccggaattttcagggatgcataccaggcttaatcatcaagatgacaggtcaccttgaactgaactgagagaagacaaagtagcaaaagtacaaatggctgaaactgttagtggcttctgggaaggttttcaccaacagagctgtatagacatcattgttgctggagtgctgggtttcctgtccttgtctcacggaagggtcctgtggccacaggacttcaagtgtggactccaaccctaaagccaagcccattctgctgactcaccatagatactggggatcagaaccatgtttcttcctgcatgccagaaaggtctgtgtggggtctgtgaagatggtatccctggtaacgtgctctacattttgttcccatttgcctttaaactgttcagttgtcccccagttctcctggagcaggtgataaaaatctaggcaggagctgagtctgtagttttctctctgctgggaaaattgatcttgcagtaagcctcagggagggctggggacattgctgggatgggccagtaatgaactcccaagtcatgcattaatcacagagtggacaggaaggtaccacctgataccataagctactacaccctgacctgggagtgcgcaggccccatgctcggggggcgagggggggttcaaaaggtaatttctaatatagtgataagcaaggtctcatgtggctgactgttgagtctttgggggttcatgggctcagtgaatatgcaatgctgtcaggtgtcagattgctttgtgccgggctctcccaggtttgcactttggtgcaggctgtcctctgctagctaggagcattgggaattgggaaaccaggttccattgctcactagcttaatgtcctcacacagattaaataaacccattgtgcctcagcgttcccgcttgcaagtagggacagtacccaccttgtagcctctttgtgaggatctaaggagacagtgtatatctagctatcatggcccagagcctacgtccagtgtcataattcgtaggtttgggtaggtagactggagcttttacctcctctcttgtctgaatcatggcatccaggacttgtgccagacacttgtcccaagagctccatagtcagtggataaaattatgactcccaaagcgtctgcccagcttctcagcaggcacagccaggtcaaggtcttcagctgacagacgatgccgcgagcagacgttgaggcagagtgggcacactggctgaagccctcacactcgctgatctgttctccgtgtaccggtttcttgctttcatacgtaggtgagcccattatgtataatgaaacactcagcatttagcagtcaggcagctgttgtggtccttgactgaaggactctggttatgaaatgtaccatttctgagagaaagcaagtgagaacgcgagcctgggacaaaaacacaactcctgggccaagagctaagaccgtttcagtgccgaagactcctgctcagcagtcctggcccttttcatgggtttcctggggtgccctggcactgcctgtgtggttcacttctttgaaggttctcagagccctgggccggggtgggagtgggagtggggctgggggagggagggtgtaggccatgatggcggaacaccagcacacatcttcagtaaagaggagtgtatctgcagtggcagggagggtacccacacggggatggcaggtacaggctgcagggcagcacctacagtgtgaaagccatgttggatggcgtctcttcctgctgtctgctttaatttgagacagaggggggcactacccacttagttggcaaacatggatcctgagctccttcagagaagccttctggttgaccttaggaagtagccaaagtgcctgaatttttccagccttttacaagggaataccttaaatagagcactgggctgctttattcatatttattaaaacaaaaacaacaacaaaaaaaactttaatatttgtattgcctgattgtcctaagcctgcctaatttattttcggtgaaccctattgcaatgtgtgttgtttgttcagccaccttgcctgtcactcctcctgcaaatatttatccaacaaatgcttatcaaatggcctcacttgtgccaaacactgtttggggccctgggatcagagatggggaagtgaacttgttttcaacctgattctcagcccatctcaattctccgatgttcagcgatccttcttctcacaaccacgcacataacaacactgggcaactcagcccttgcttctcagctaagagaaccatgataaagagtggttcaaagtggccatcaagatggctccctctccgagggaataatgtagagaagtctgacatgattttcaagatgtgagcactgctctgccatttagttattcattcagttaatgccctctgtgtgggcattctccaggtcccagtagatacatccccatttactgaagaaacatgctggtgtcctgcccatcttgtccctcacctaccctaggcttctggaatcttctaagcagaacttcagtgagctttattcaatctccaggaactacgtgatggaaggaaaaacagacttccacaagtctctggaatttcacactcacgagtgtgtgggcacacattgatatgatatgatatgatatgatatataccatgagtatgtatgaacttttgtatatatgcatatgtgagttattgggcccatgaattatctgaactcatgggggaatcagaaaccagagcttcgctctcctccccttcttgtccaccaaattgagtttccagtctgctctgctcaacccttgaaatcttatctgtggctttgttctttcctctaggactgagctgtcggcctttcagggtgacaggttgatagaatcaagtcatctgggctagtcaggaagctaataatggcttctgcaactcttctgtgtctttacttcaaccctggctcaaggtcacctgctgtcagacagtttttcacctctggcttcagtagattctgacttggctgaatctgtggttagggtctaccttaggccaaactttatagctgggtcagggtataaatctgctgagtcataaatccctggataatcaaatagagtctctcacacacacacacacacacacacacacacacacacacacacgcacacgcacgcacgcacgtattttatcagcattttaccaaagaggtgagtttgagtgatagccacaatgacttcccttctaataaagacttcctgaaactaaaggtctttctccaagcaccaggaagagaccccacacctgcttgggattggcaggcggcccagctgccccgctgtctgggatctggcagttgtctcgccttaaataaaccaatctgaaagatatattcccaagcaagtaagatgggtatgtttgatgggcatcgagcagagatgtagtttattggattttatcttgcaactgatttgtttctgccagacgttgatatgcagccccgatgccgtgatttcaggccccgggagtattaatgttacaaacaaccttccgttgctccgtctgctagtaggagccttaatttatcacagagatggtagagttgctgtttctcatctactggtaaaaaaaaaaaaaaaaaaaagccaggcagctgtgggcaatgtgtgtagggaatgtgtcctctcttttaagaattcattctttggaataagagagaaatttattctaaaatatcttcatcccgaaggaaataaaaaccctgcttaatggcaaaggctctcccttgggctttgattaagcagatttgcaaggctgggctttctgtacctgttgtttgtcattggggcccagttagactcggggaagaaaatcttgtctcaggcacctaatgtgacaggtaccttctgggacccagatgtctgcctgcaggaacctgctgccgccacaggtgtgctgggaggacacatgtgtccagtgagcgacctgctggtcactgtggaatgaaggcaggacagattcgtctgttccttagcctcgatgtgatgcctcacataatactctttttttttctgattataaagacaaaaccctttcttataaaaaactgaattcataacttcatagacagaggaagacagaactagttgtgggacagtgaagatggcttagtggataaaaatgctaccatgcaagtgtgagatcctgagtttgaatccccagaacctatgaaaaagccaagcacacagcgtgagcttctgtaatccccacacttctatggggagatgggaggcagaaacaggtgcgtccctgaaagtgcctgagccagctggcctggagtgtgaggcagaaaacaaggggaccctgtcttaaccagagggatggcaagttgtgacaccgtgcttgtcctctgacctccatacaaatgctatggcatgtagtcccatccatacgtatgaatacacacacacacacacacacacacacacacacaccctctcctccctcttgtcttttccttggtatcccatcaacaagacttagtgtttgttgccgttctatctgtccccggcctagtctaataaacatttatattgtttccacaactgaaatctttctgtatatttccatctgacttcaggttttgtacttaattctatatttcttatgtgacctctgcagagaaaagtcatcgtagcaccacaacaaagcaacagcttggcttacagtgccatgccctctttcaatccaagagaaggggatcccactcagtggctaagggcatttgctagacttggtttccagcttccacaggccagttcacaactgcctgtaactctggttttagaggagctgatgccctcttctgatatccatagatgttgtacacatatgatacacatgcatgcactcaggcacatacataaactatatatacatatatatgtacatatatatatataatatatttttttcagagagggggtaggcattaaattattctataaatgagtgattataattgggataagagctgtgaagcagatgaacagggggtcctgggcacccaatagtcttaggaaatcagaaagattcttagctattaatgctcagggctgaaagctgaggcctggctgaccaggcagagccctggagaagagcagcaggggagttggccaagagctcaggcaggaggaagtggaaaggaaaagccaaccgcacaggcaggaggaggaaatatctgaaacaaggtaacacaggagatgtggcaaggactgcatgagtggctatggtctaggatagggggcttcgaatgagagaattgacaagcaggtttcaatcatggatatggctggaaagagtaggtgtgcagttctgtgtggtcattctattgtacagaatagggatagatgagtggctatgaggagctgagtcaggaggccaccactataatctagatgacccattctggaggattgggataagatagatggagaactgccggtcagtatctatgctcttctgtgtttgaggagcacgctgttgaaccccagtgcctcactggcaatggggaaaggaaaagaaaaagccacactggagctgtgtcctagattcctaccgtttgcctttggacagaagcaccagatgctgaaatagggagacatgggaggaccaggtcttcagaggccaagggatgatgggggctgagttggatgtggagttggagagaagatgtcttgtctttgcagactgaaatgaagcatgtattctgggtgaaaggttgagagtttgagatcagcaagcagacatcagaagaagtaacaagtgattgaatcggtctgggctgaggtggtctagggaggcagcacctctgtactttgggagggggaggtaggatgtgtcttggctgcccctcctcgtgtctatccatccgggctcatctgaagtcaactgttggtgacagctctcgccatttagctttgtgctgcagccagcacctgctggctcacgggtgcttactgccccccatctttgggaattttctgagcctgttgtttgcatgtggccatgccaggagccattcacacatggtcactggcaagtgctatgaatcggggctttgaaaatgacctgttccttttcacagataacagattgttaaatatttacccgcatgctgttgtctgtgaccaacctctgtatttgtttctggtgtcgggtgtggtttcctttccctgggaaccgtgagaggcagttatccgtgatcgttttgatttatgtcttgaaattatctgatttgcttttaaatcatcagcccttcagggtaaagagatccttgagtcatggacctgtcttcgtctcagcgtgggctctctgtgccctgcagacagatgactacacacttggggacctagcacaaacgtgggctcttgaagctgctctagtttaataagtgtcttggccagttcagtgctgttcttggcttaggcatccgtgggctctttctcgaggttcaaggggcaagctcacctctgtgccctactgccgagtgctgactgatttcagcctctcatgacaacaggactaaagtccccaatttttttgctggctgatagagctgctatagagctgctatattccttaacatcccaatgtcttctgccacatgccccgcagagatactgatctctctgttcctctctgcccctagctggagaaggccccgaacaatttccttgtctggtcccgtacctgcagtagtgtcctgggcctgccctaagcttagagcattgatggctacttttccatagtactataggctaaaggccaaaactgagtgttctctccagagcatctgtctaggggtcttcctcttcttcttcctctccccaggacggagtgtttctgggttgtggcaacatcattccagtgactgcctctgtcttgaatgcagttgtccctttgtattctctctccctttctgagcccacatctcccactgcttacatgggcccaccctgatgacatcaccttccctaatgctatggtcagagcttaactttctcacaatgtcatcccctgtggtaaaggcatacagtcatgtttagttctgattaccaacttgacacagcctgcaatcacacgggaagagagtcaaataaagggttgtctagattagactgtctatgggcatatctgcggggatggtcctgagtgccttcattgatatgggaagacccagcctgaaagtaggcagcatcgtttcctggaccatatgaagggcatcggatgagctgagcgctgagcttgcatgcattcgtccctccctgctcctgactatggatgtgatgtcagcagctgcctcaagctcccgccaccttggtgtccctgctatgacagaatataaccaagagctgtgggtagaaatagacctttctcccttcagttgattttgtcaagatagtttatcccagcaacagaaagtccaccagcctgtggtcttagtcagggcccagtgggaggaagttaggatgtagactccttcctcttgttgctaccatgtcaccaagaggtaatgtatttttctctctacttcattctccctggtcatggacccagagcagtatggctacatgagcaacgactaaaacctgtgaccaataaactcaaacaaacgcctcttccttataagttgcttatctcagggatttttgtcccaggaagggattgtctcaatatctgcaatactaagattctatttccaaataaagtcacattagcagctggataacttctcagcatatctatctttatgaaaactacaaagcccctcctagccatgctacataacagtttaatcacaggaacggtgttggtgatgacaaatgtcgattgtcaccttgacaagatttggagttgcctaggagacacacctccaggactgtctcgaagggagtttccagagaggcttcactgaggaaggaagagccaccctgaatatgagcagtaccgctaagtggcctggagtcacagatcccaggctgactaaaatgggaaccgggagctgagcagcaacatcgcccctttctccttcctgtgtcctgactatggactcaggtggccagcacactccatgctcctcaaggccttttctgccaggattgaccaacacatcctcaaacagtgagccagctctcctaagttgcttttctcacattttctgtcatgacaacaagaacattaatgagttcagtatctcattatattcaaaggtcccaagaatgtgggtgtgcagtcctgagggagcagtatctccagtagaattctacctatgtgggtttttaaaaaattattaatcatttgtttacatttcaagtgttattatcctccttcccactctcccctcctcaacctcctcaccccgtcctccttccctttgcctctaagtgtgtgttccctcccccatccacccacttttgcgttacccctctagcattgcccttctctggggcatcaagcctccacaggatcaagggcctcccctcccactgatgccagattaggcagtcctctgctacatatgtagcaggaggggtccggttagttgatactgttgttctccctgtgaggttgcaatctccttcagctccttcagccctccccctaacttgtccattggggtcctagtggttggctgtatctgcatcagtctgagtcaggtgctggcagagcctgccagaggacagccatgccaggctcctgactgcaagcacatcttggcatcagcaatagtgtcaagatttggtgtctgcagatgggatggatcccaaggtagggcggtctctggatggcctctccttcagtctctgctccatttttgtccctgcatttcctttagacagggacagttctgggttataatttttgagatgggtgggtggccccatccctccactgggggccgtgtctatctacttgaggtggtctcttcaggttctacctccatgctgttctgtatttcagctaatgccatccccattgggtcctgggagcctcttgcatccctggtgtctgggactttctagtggttcctcaagttccctccccgcccctgctacttatttctatttatactcctgaccctctggacttctctcctgagaagtctcttcccatacctattcctgccccccttttccctcccccttctctcctctacccaggtccctccttttctctgactcctgggattattttgttcccctttctaagtgtgtttgaaacaaccacactttggccttccttcttgttaagcttcatatgctctctgagttgtatcatgggtattctgaacttttgagctaatatctacttatcagtgagtacaaaccatgtatgtccttttgggtctaggttatctcactcagaataatattttctagttctatccatttgcctacaaatttcatgaagtcatgaagtttttaatagctgagtagtattccattgtgtaaatgtactattcttctgttaggggacatctgggttgttcccagcttctgactattataaataaggctgctataacatagtggagcatgtgtccttgttatatgttggagcatcttttgggtatgtgcccagtagtggtatagctaggtcttcaggtaaaactatttctaattttctggggaacatccagattgatttccaaagtgattgtaccggcttgcaatcccaccagcaatagaggagtgttcctttttctccacatcctcaccagcatctgctgtcacctgaatttttgatcttagccattctgattgctgtagggtggaatctcagggtcattttgatttgcatttctctggtgaccaagggtgttaaacatttctttaggtgcttctcagccgtttgagattcctcagttgagaattctctgtttagctctgtacttcatttttaaattgaattatttggttttctagagtctaaccttttaaattctttgtatattttgaatattagccctctatcagatgtagggttggtaaagatcttttcccagtccgtaggttgccattttcttagtgacagtgtcctttgccttacagaaggttttcagtttcatgaggtcccatttgtcaattgttgatcattagagcctgagccattggtgnnnnnnnnnnnnnnnnnnnnccgcttttggcttttttcttgaccgattagctggctggtaatgggctgcttcttcctcccagtctgtttcctcagaggaggattcttcatctgcttcaggaactactaagagctggcttcctgagctcatctagtgacgagtatctcctagagacctccgctaatcgatcttttttcttctccctttttcctctttttcttctaatctctctccaggtattcctacctaaccttaacttttcctcgggttcaagacccttggaaaggcctgtatacttaccgtttctccttgttcctactctctctctccgctttacttctgatagactgtcctgaatttcctctagaatttttagccctgccttaagcactatataacatgtgaaaaggaacaaaagggctcctaacactagaaaaagttcaaggccaaacatacctggtaaagccatttctcacttccgttccccagctgatgagttctgaattcggcagttgaatccttctcaacagtctgctttacgggaacctttatcaccgtcgttccccagctgatgagttctgaattcggcagttgaatccttctcaacagtctgtgttacgggaaccttataaacgtgatccgcagttctggttctgaaatgaagtatccctcctgcgccagtcccgagttttttttctcgtcccgggtttcggcaccaattgttattcgtcgcgttctcacgaccggccaggaagaacacaacaaccagaatcttctacggcaaagctttattgcttacatctttttggggccagagtgtaagaagcaagagagagaagcaagagagagagaaaaacgaaacccccttctattttaaagagaacaaccattgcctagggcgcatcactccctgattggctgcagcccatggccgagctgacgttcacgggaaaaacagagtacaagtagtcgtaaatacccttggctcatgcgcagattatttgtttaccaacttagaacacaggatgtcagcgccatcttgtgacggcgaatgtgggggcggcttcccacatggaggtccttgatctacttggacttgagctttgtacaaggagataaaaatggattaatttgcattcttctacatgcagttagaccagcaccatttcttttcttttttctttctttctttttttttgggggnnnnnnnnnnnnnnnnnnnnggtgcttctcagccgtttgagattcctcagttgagaattctctgtttagctctgtacttcatttttaaattgaattatttggttttctagagtctaaccttttaaattctttgtatattttgaatattagccctctatcagatgtagggttggtaaagatcttttcccagtccgtaggttgccattttcttagtgacagtgtcctttgccttacagaaggttttcagtttcatgaggtcccatttgtcaattgttgatcttagagcctgagccattggtgttttgttcagggaattttccctttagccgatatgttcaaggctctttcccactttctcttctattagattcagcatatctaataggttttatgtggaggtccttgatctacttggacttgagctttgtacaaggagataaaaatggattaatttgcattcttctacatgcagttagaccagcaccatttcttttcttttttctttctttcttttttttttttggggggggggggtgtgtttttgtattttttgagacaaggtttctctgtgtagccctggctggcctggactcactctgtacaccaggctggtcttgaactcagaaatctgcctgcctctgcctcccaaatgctaggattaaaggcgtgccgcttagcttttttttttttggggggggggggcaccatttcttgaaaatgctgtcattttacaactgtatggttttggcttctttgtcaaagatcaagtgaccataggtatgtgggttgatttctgggtcttcaattctattccactgatctacctgtctatttctgtaccaataccatacagtttttgtttttgtttttgtttttttgttgttgttgttttgtttgtttttatcactactgctctgtaatacagtttgaggtcagggatggtgattctcctggttcttttattgttaattgtttttgctatcctgggttgttggttcttctagatgaggttgagaattgctctttctatctctgaagaattgccttgaaattttgatagggattgtattctcctggggtctatgtgacatctgtacaagatctgctggcttttagagtcccaggttgagaagttttgtgtgattctgataggtctgggtgtgggctactgctcctaggcacagtcatggaccagaaggatggtgtgtctccagcagcgcagataggttctgcatcctctggctcccctgggggtcccagttaggccagttattggggtgggggtgtgtctcctgtgtgcctggttatgatagacctcctgggattcaagctgactcttggtgtgggaggggatctggtacctatgtgtttttaaaatgtgcccttcagagaattgcctcattggctgacttaaaaccgagcccttattagccatcaggtgtcagtgatacacctgttccatttttctcctgttttgaaggttttgaatctttacaattgtgtgtgtgtgtgtgtgtgtgtgtgtgtgtgtgtgtgtgtgttatgtagcgggcaggagcatgctggggtgcatttgtggaggtcagggaactacttgtaagagtcagttctctcctctgctatggggctcccagggatcaaactcaggtcatcaagctgggtccaaaatcaggcagtacctgaatgatgatgagctgaataaggggctagggtgaggcctgttataatgcagcccacttcctgcttcagacaggaagacgatcatctctgtgctccaaatcaacagcaatggaaagtttgctgctactttttgttttcttaacattgtaaaatgtgtaacaagttgctcactttccctcctgggcctcccctcccatccccccagccaccttcattctctagctgcacctgtgcctttctgtcggccccgcccccctcctgtctctcccctcccccagcaggcgcttgcagctaggactccagacatcctcactgcactcactactttctgcctgccctctcttttcatcttccccgggaatggggtccccactttgagtgatggctgtgtttcatctgcaactgactaaaattacgtggcagtcagaggctcccttttatctcctccctgtctagatgtcaagcaaatcccaaagttaaaacacaggtttttatgaagcaaacagaagtcttgttggaatctgtagtcttgaggacagctggagggcctcccactgttgggcccacttgctctctccctttggggaatttaattatgctgagttatcctctcacctacaatcatccactccttccagaaaggttagagaatagcattagtcactaggaaattttgttcttggaaatgtttggttcttctatcatcagcttgtatattctcagagggtaatgtgtcaatcacatttaaaaaacaaaaaacaaaaaaacgaaaaacaaaaccaaccaaacaaacaaaaaaaccacggctgttttgtaaaagagcttgagaacccaagcttggaaaatgcactccttcattactgtgtggttttccgtgctgaactccttaccccagagggcacgacagccccagaggtggaaagctgaggtcttgttgccacgaaggacaaactctagtcacatctgctgcagtgttacaggccacactctgtgctgtggggcattgtgtaaaggatgaggaagggttgggttgggttggttttggagacagacctgaacctgtcaccttgttcccatcactctctcttcagagcccaggcacatgctatgcccaagaccagggctcagtacacttgagtctccatcttagcaatgagggttaatggtcctggaacctgagacatgctgaccactgtgaaacttgtctttacaaagtgagggctgggttgccctttcaggggccctgggagggacagatgggctaatgggaacaaaagcaagaagactgcagagacaggggtaggaaatgatggaggaataagacctctactaatgatgattgagactcagaatagaattccagacaatctccttgtcctcctgcccaccccctcactgtctgtctctgagaagagcaagagagtattcaggggagcagtttgccttccacctgcaaagcttcagactggccccgggagaactgaggacacagaaatccactcacctctgcggggcagccataaggagatgctccacagaggactctctcagtatacattggttggcagaataaatgaagatcaaaatctgagatggcagggtgtgggtctcctctcacagaatcctctcatccagctaaaaatgtatgtagcaggagggaggtgagggggtggggtgtagctttgcttcctcagggacttcaaagggactgcagagctgttcacagtggcaagccttggcaatatgtcagaggctccaaatccccaacacgggattagtcatctgagcctgtgttcagccacagaaggaatttaaaaccgtgttaagagtgtgcttcactgaagcaaatgtaagttgtcactattacgaacagcgcattttaaactgaacggaaaccctgggaggttgcctgatttctgggtgggattaggggaagcagctggtaactgcggcttataggtgctttcccagacacatagcctcacagccatgatgatatgcatctggcttttgcttgagtagctcaaacaaataactatattataagggtgattctccttacctctcgggccccttggacccagtaatgtaattgtaaccaggagatgactgttcaaatgatgggatgccctgagagatttgctccaagtcaccacccactggggttagaagagagctgcctagaagatgtctgtgtgctttataaacagccttgagggggactgaggtgtagatggtcagcggcctgtggctgagtggtacacctaacagctggcattctttctaattgatcagcattattataagtttattaatggtgggaataaggtgtgtgtgtgtgtgtgtgtgtgtgtgtgtgtgtgtgtatgtgtgtgtgtgagagagagagagagagagagagagagagtgagtgagttttgttgattttaggtcttgagagatgagagattgctcagagtgtttgccatatgagtatatataaatttaaactccagaatcgtaaaactgtaaaaaaaaaaaaaaaaaaaaaggccaggcacagtgagaaggcaaaaccaggtaaatctctgtgtcttcctggtcagcctagacccctaggtaagctccaagccagtggaagaccctatgttgagagaaagatcaaaggcatctgaggaatgactctcagccttgtctgtggcttccacacactcatgcgcatgtgtgtacttgaacacacaggagcacacacatgtaaaaagaaacccctatactcccatctagatacccacgtatgatgactatggcatttcctataaatagggaatgtacacgtgtcaacagacgtcactagaaatctcttcccctgggctctgtgttcccagggctgcctaccgagaggactctggttctaacacagtgagtggcacacagtattctctcacacctatcttcagcaagagagcgtttaaggaagcttcggtcccctggacgccctcttcatagtcctgctcacgaagaactacaacactcagaggctgataaaggctgaagtgagcattttagagcctgtgcattgaagtctcattttgagcaaaataaatgaagcttttaaggttctctccaacttcccagagtcctgttaagattccatccgtgattttatgctttctctccacctacacagtctatgctggctgcctgcctgcctgcctgagtcctggtttcctaccaaggcctggcccacaggaactgctactttgacagaaatgggggcatgagggggacactcacagcttctgccatcatagaagctctaggggcatgtcacctagcgcaggtgcccgtgacaggtctgggttctgctgtgacatcagcaatagagcccagtaaaggtagtaattggcgcatctggagaggaccatgggagaagaggctgaaaatggggcttttggggacctacagttaggcaggaggctgccgcacatagccagtctgtgtgtaagtggtctactctgcgttgctggaatgtggtccctggataggttcctgtgtggatgctgcagcccagacatgagacaccctgtcttctgtgtttattcactatggatatgtttgcttttctgcctcagaaaggagagagttgtttacaggcacactgtcaaaatattgactcagagtaacctgtgattccaggactgagaagagggaaaatacctcactttccacgctgataaaagcctgggcaccgggtgtgccatggtgcccacaccctcagagtgccagagcagcatgctgaaagagcatggacgcctttcctcagcagccgtgggcttccttctcagtgttgcaagagacaaatgtacagaaaccaagcaccagtctgccaagggatgtcagcatctcatcatcagagctggtttcacccagatagacggcaatagcattgatcaaaatctgtgcttagagtctcatgaggtctaaggacgcagatgtagaaacagtccatcttccgaagctccccctgcctctctgtgttctctgtgctggcaaggtatccagaaatgcctggaaatggctttggagtgtaggactcagttttcattacatctgttggggacagtcgtcacgacactgacaccagcagccaggcaagtcactcctgtgctggactggatgtggaaagctttcagggaagtgaaattacacatctgtacagcccagcattgtaagaagacatgatcgtaagaattgtcttaggcagaataatccagtgcggaggtctcccggggcaggcagaagctgtagaaaccatcacctgggaaatccctaattctctagacctccagagcatgcaaaaatatctttcctatctctctgcgtgcctcttgggtatccatttagtgcagcattgatgccttggccagctctcacttgctcatgtaattcatgactccagtgcaatgtccagctccgtggaaacctcggagtaggaagccggcttcagtcatggcaaggccaggcagggattctacagggagctcggctgagaagggctccccagggatctcagccctcgtttccgaagctcaggattggggcttcctgtggactttgagcctgccaagcaatggctccctgaaaagggtaggacagaccaaggtaacccaccccagcaccagttaaacccagtttatattgctggtgtggtccctcatgtccccactccaccccataacagttggcagggtggttttcaggcaaggcttatagccagagctttggagatatgggaatctaagaattgaatgggcagtccccagatgccagggcataaggctagtgagtggtctagagactgcgggaagcataaaaccaccttgccttggatgagggctggacaccacggagcctgtagaactggagccttggaaatattcacttgtctggcaccctgatcaataccccaactccagggagagtctttctgttcgttttaattttccttgagagagaaacttggcattgggttaggagcttttctccaaatctgcatatttggaacttttttttttctcacccagataagcctgtaattcccatagcacgcgcaggaggacgtgctccgtcagcagtctgtgttcgtttcctgctgccaggagggtcttcagtgaagctgactcatttcctctggcctttaaaaaaaaatcctaaatcatatgagggactaatgtcagcaaagatgaagattataaaacatgagttaaaagccacaaagcatgggttggcaatcccatcagctcccagtcacaatggcagggcgtccgcatctttccactcgtgagccccttccatccaaaggattgtaatctaactacaggcatccagtgtaagtcctagatgtgaaattaaacactgaggctggagagatggctcagcacactgttctcacagacagcctcaagccaatgcccagcacccacaccacataacttaaaacagcaactatagctcctgatgatcagaccccttcttctggcatctcctggccttgtacttgtgtacacaaacccatacacaaattatataattaaaaaataaaatctttaaaataatgaatcaaacatctgttgataaatattctttcaaaacaattctttgctgtgcacataatttaccacttattaaagaggaaagaaaggtgcatactaatgagatagatgcccttgtttgtcaaccacattacagctcggaactatcttacctattgaatgttgatgggaaaatattgtctttgttttccataattaaaccattatatttccctaagaacagaagacattgtacacatagcaaaaaacaccataatgtataacacacagtaggtccaatctgagcccagatatttgaggcagtatctattggtggtgtattacaggcatgtacaatgcaagagtgagtgtgcgtgttatgtgttcaacaccaaggctgcggtgaagtcacatggccctatacaggtgaactctgccagaaacagcttagattcattaacatgtttgattttggattaattgttggtcatcatgcattcagaaacctttctttgatgataatttacaacccacaatttaagaaccttttagagtgcctagagagatagttcagtggttaagagcacttgctgttcttgcagaggacctgggttcagttcccagtgcccctgctaggcagctcacagctacctaggacttcagctctaggggttcttaactgccctccagattcccatagacacctgcatgaacatggtgcacatatagacaagctttttaaagacaagtgtgatgtgataaaaggtctgaatgctggttgcttctctctccttgcattagccatttttcttctttgcacatcagaccttcatttgcaaggtgtcagtgttgaaccagatggtccttgatggaacctgaaaatcaacatttggttctaataaagcaaattggaggtccaatggggaagattctcttgaggtcctctacaacagagatggagccatcacacagcccccacagcatctgagattggaaagtctcaagctgcttattctgccctgcgtagtagctgtgtgaagggcttggctaagcagtgtcagggtcagtctgcattaagaaagtgaggatgctccatccatagctcagaaaacacttacagtgaccctgtgaaggagaggctgttatatttaagaaataaaagcccaaagcttcaaggtaggaattatacccaaagccatggagacagactgtagtacagttcaccatgaggcagactgtgcacacggagggactccccactgctgctgcacctcaactccctcctcatcacctgtgaggaaagatggtgacagctcaggtacagaaggaagtgagtacaaacaagttgcagcccacatcacatggacctgcccttcatcttgagcacctgtcctggactccatactcctggaaggggccccacgttcatacaacatacaaggagatgggaggtcaggaccaaggtcagtaccagagcagtgggtccagcagtgcctttagaccttccttatgccctcagcataagatgcccacgtgtctgcatcttctctgtgtgtgcacacaggtgttgctgcatcttctctgtgtgtgcacaccagtgtggctgcatcttctctgtgtgtgcacactggtacatgtgagatgcagaatcagtcccactggcccagacaggactattgggaaggagactatattcaagttgtaacccttgatgaagctaggcactattattccttcagggaggcaatggcagggactcctgctggtgtcacatgccacacaaggacaccagatacccatcatcttggctgcctaattttgagcgaacttatttctctctcatggctttcctggcaagataattacaatgtcgctgcactccagatagggcagtaacaacatgccagagaaaggattccacccaagtcttgcttagtgaagtgacaaggtgattggggttttttgtgggagcacaagtgacccaaaggcagatgcattatcagaaagtctactgtggcatgagtgataaccaacggaaccgtcattcatgggctccctgcacaattagaaagcaggtccacctgcaatagtcttctctctctagcagttgttcactgcttgtacgcagttaggattatattgttatgaagagacaccatgaccaaggcaactcttacaagggcacttaatttggggctggcttacagtttcagaggtctggttcattatcatcatgactggacatggcagtgtgcaggcagatgtgggactggaggagctgagagctccacatcttgatctgaaggcagtcaggaggactggcactccacactgggcagagcttgagcataggagctcgcaaagcccaccccccatagtgatgcacttcctccaataaggccacacaccacctcctccagcaaggccatgcctcctaatagagtcactgcccatagccaagcattcagacacaggagtctatgggagccattcctattcacaccaccacacacacatatgtgtaccttactttctaaccttcctgagtctgaggaaccccccttttctctccaggaggaaatagctacacagcattccctgggcctcagtgtccccatcagccaaatgtagataacattcccttgcttgattttgtggctctccagtatattcgtttctgcccaaggcagcgtggtccagatctccttctttccacccaccccatcagacccctggtcccatgagacctttgccttagatgaggaacccaggctaggagccatttccagagccgtctggtgacttgatagtaacaagtcatctgaagtgtctttcttttcttcacacaagtcagcgagagtaacttgtgttggtgatggatttgcataggggaacacatttttcttcaatttatctcctcaaaagcattttcagatatggctggtgattgagttcgttttaaagaaactaaaggacaaaatagggtgaggaaatgctggctgaaaccatgtccccttttctgctcctctgaaaaatcaatcacacacccccccttgcttcccttttctctccttcctcatctccatctcttctgcagcctgtctctccctgaaggtttttcagatggcctctctcatagcctgtgcctcttctttcagattccttcctacccctcccccatacacatttgactccttgttctctgtgcggccatgtcatactgaggtctttcatggagaccataggtcctgagtatgagctaatccaactgtggccactgctgcccagcagccagggcttcctgttcatctcaagatgatgcccataacctgacagaaagaaaatagtctccagagtggaacttggaactgggggacatagaaatgtgctatactgagaagtttgttttctggaaaaagcccactaggagaatttgttgatctgagtagtgagggtgtactttcctgagaagtcattggacacactattgtgcccgtatagagaggttgaggtagccctcgccccttgaggcaaacatctgtagtttaattcccttgttcaaagtctaaatcttcatctttgagacaaggcctactctgtaacccagcctggctttgaactcttgatccccctgctccagactctaaagtcataagatgtacaccctcatgtctggcttaatatctacattttgatccagaaacgagctcagggcacttgctggggctctgggtagcacaatgtcagtgacttcagcctacccatgaagagtaacacgtgtacagcttccatgctggagtgactggatcctcacctgccatgtgccaccaatccctttcgctgagtgggcttaacacctctgcagagcagcaagccctagccctgctttctttctactttgagtagctgaaattaaattgcacttcatttgcaatattcctgcatctagccattgccagcacaggctggccctcctcccaattagttggaactgttaaggcttccctgcctgggatgtggtgccattacctgcccatcaagggctccctcttgctttctctatgagtctccaggcaggtgtttctttagaatctatccccaagagccagctgtgagcatgacctctgactccttacatgttctgaagcacgtgtaaagggaaaagaatgttcctacaatagaggctgcctcggggccctcttcatggccctacagggtattctagaacgcctcataaaattatcttctgggcagagacagagcactacctggggcagtcacgtttcattttttttttaaaaccaaaattcatagctactgtccagagtaatattttgaattttttgacagcaagaaacaaacaagccaagaggaaagttcctctggtgaagttgcccttcaaatcatgcctggcctgaaccatgggatctttcctgaggccgcagcaagagtggttactcagtaattgcaaggagcttacacttggcattctcgtctcatctcttttgctataccagacgcccagacagaaaacaacatagagaaaggtttgtttggcttacaattcctggtaacagtccatcatcttggggaactcaaggcaggaattcaagtaactgattattatactgtatccacaggcaaggacagagagagaaaaaataccctctcccaccaattctgcctgcttctttctctgctagctttcttcacattctttcagggtccagcctagggaatagtgtcatccacagtaggctagatcagttaattatcaagagaagcacccacagatattcccacaggccaacctggttcttggttgtggcaagttgaatctgcaaattaaaaacacatcatcacacataattacagttctcctttatcagatacatacaaagcaagaggaaggaaacagagtccctcgtaccaatatctgatgcagaagcgtgagcagctatggggtgtcctaaattctcgttctaggctctctctgctgcatcctactttcatttgagagacagtagacaatattgatgagctatgtgggaagacaagtgctgccactgagcccaggctgggcagtggtggcacacacctttaatcccagcacctgggaagcagaggcagacagatctctgtgagttcaaggccagcctggtcttcagagagagttaattctaggacagccatggctacaaagaaaaaccttgtctcaaaaaaataggaggggaaaaaaaaggcaacatggaaaatgtaggttctttgtgtaaagacaggatgggagttccaagctaccctgtctgtgtttttataaacgtggtgctagtgatagaacccagggccttgaccatagtaggcaagggctctagcactgagctacatgcccagcccaaactgacctattgaaaactacaagcagaagcctgaccaagcatggcagcatgtccctcaaatccttgtacccattaggctgaggcagaaagactatgttttcaaggccagtctgagctatatagcaagacctgtcttaaacaaccaaaacaaaatcaaaacctaaaaaggacccagaagcctgttttaatttgacatatgaatgatactttttattaagtaaacttcttcattcatacaaagtagcgaatgtcattccccactctttctgttgcttaggaaagtttgtgaagtgcccctcttccacctcactccgaagttgtgtgagggaaggcttctttatgcaggaataaaaacaggccttgtactgagtcagtacccttcagcagcagtcacttgcttcttcaagcttgctcctcccttatttcaatttatttgcagagagggctcaaaagtagtgccaccctacttctgtctccacttgccacttattttgggagaccactacctccaccctgaggagcaaagccatcacctggtttgctgtgtggccaagaaaataccacattcaatacctgcagaaagtctgctccctgggcagaggtgaggtgtagaggctggcagagcccactttgggcagtaacaaccaatcactgcctgggaccaaagtatgaagggctaaggaggacagaagcccatgggccagttaaggaaggatctgaagcaagaatgcagagtagacatttgtaaggcagtctgaaatgccctgggaaggagctgaagacagggcttccccaccagcccctctcctgtaagtgtacaggacaaagccttgtcctcagattgggcttggaggtgacctatatgctgacagcagatgtggcagccagaaaggatgtcttctgttgggtatctgcagccctgatcagaggcgctcagatgtccctgctgcctgcagcgtctcttctactacgctagtgtgtactgtcctgaaccacagtgtcctaaacccttagatacaaggacacaggataaaggcttgaccctgcaagctcagtaatgaggctactgtgagaccagaaccaggccagtagtctagggctaaaaaaaaaaaaaaaaaaaaaaaaaaaaaaaaatagagactgtttccctgatcccaccccagatgacacaagtggcctccaaaggtctgctttagaagagagaggtcttacctctgacagccagccctgtgtgtgcatgtgtgtgtatatgtgatggacaaggtacaccacactggtatgtttgagtattgtccttgttagggttggcattgcttgaacagacaccgtgaccaagacaactcttataaagggcagcatctcattgaggctggcttacaggttcagaagttcagtccattatcaagaaggcatggcagtgtctaggcaggcatggcacaagaggagctgagagctctactcctgtttctgaagtcaaacagagaagattggcatccttaggcagcgaggaggaagctttcaaagcccactcccacagtgacacacttcctccaacaaggccatccctattctaacaaggtcacacttccaaatagtgccactccctgggccaaccatattcaaaccaccacaggtatacacgccacaatgcacacagaggacagagaaggacattggggatcctcctccatcacactccatcgaattccctcaagagagggtttcttattgaacccgaagctacattagtggctagcaagccccaggaatcctcccatctctgagcctagcagggctggggctatagtgcatgcacagccacactcagagttttgcataaggactcaaagccaggtgcttgtctttgttgagaaaatgttcttagccactgagctaggtgtcttgtctgctggccctttcactgggatgagtgctgtgaattaccagtatcaaacactttgctgggtgctcgttctatagatcgttttggcttgtagaccctgcaggtggatgaacaatgttcctgggtcaagtcttggcttgactttgacccagggttacctggattttccatagagaacctgagtgttctcttctcagagggtatagagtcttaccaagtacttgggactagcctcttgccaagttacagatgaccgttccactggccacgggacccagagcctctgctttccaaagaaagccttggaattctcctgaacatccacaccttctcatctgcaggacagaaagccagggtagaaatgctcttgtctccttacttcctttcacggtaccccgagcccatgggatctgtattcccatgggggaaccgaagcccacgacaggaagagatacttgccattggcaaggctagggtcagcctttcatttcactaggtcactgagagcaggccatgcaaaaccagataaaaccctagataaccataattcctgccttaaatgtttctcagaagctcagcagttctataacctccatcctttgtctcagctgcacatgggaaaggatagagcaggcccatctaaaagcttgtgtctcctgccactgcaccctggcatctccatttctgtctacacgtgtgcatgacatttcttccatgctgagcacactctatcagtagtggcgagtcccacggaatagaccctttcatatcaaatagagctagttcagtgcagactggcacctgctctctaggtagccactgcctgactcaaggccagtttctcttttgcatctcagcatccacttctcttccttcttctctgggaacatcagccccaggctgggctccagctctctctgttgttgggtgctcccacggacaccatgggaagagccctcagatgtgtatcgtgttgcatctaactgatttgagtggcagccctgggaatacacctcccttctctgacagcatgtcacttccgaatcactagcagactccaagttccacaaaaggaggatctgccttgaactgactccccactttgaacccagacagtggcacagagcctggacccaagctctatgcagggaagaacctcttctggttgactctcccctgggagcccaggcagtagcatggagcctggcatatattgagctctcaatagatacttgttgcatgaacaaacagaatattcttcctggacacctgtgctcagaagcatccatagtgacgctttgctcctgggtgaggaagatcagcaggggaacctatcaccacactccaatcagaagcttcaaggtcagagaaccctggaccccacactcactgcacagaatgtcctaagatgtgtgaggtccccagtgtctcccaagcaacaacatagtgcccagcccttagcaggtaagcttcccaaggatttattatgctaagagccactgtctcttcatgtctgtctcagaagtatctgagattgccagatccacctctgtcacagcctgctccatctctctccacacccaggatatctgtgaccacgtgtgatctactgctcaatggcaggggctttttttttttttaaacgagtgttactgaggtgtaggtaggtgaaggctttctgaaagaaatctcctttgaaaaccaagtctcctctttctaaggaaaaggagattatcaactactgacacggcctcctgggtcatagatgaggtagcttactgggagcagaggttaagcagtcaatgagattgtggggagactcctgaaaggcttttgcccttgatactgggaaacacagatggagaaggagacacactgctacaaaggatgaaaggccctaccagccgctcttttccaagccagcaagcacatccagggcaaggtgccactcacatcgagccagcatcgagccagcgtgtcctctgcagagcctgggtaacggggagatctgcgtgctggcccacagtcactcagcaacactgtgtgcctttagcgcagcagtaggaccatggtgggctgctctactggcatattgcctgtctttctgcgatatccctaagagtagcagtgcagatgctcatataaggcttcttctccaccagtggggtcaccactgttaccctcatttttcacttggggaaactgaggttcacagagatgcactcatttacccaacatttgaagggcttgctaatggcagagctggagctggaacccaggcaggtgtctgcttgctgcgcacagggtgataggcagccagcagtaccgtagctgcccaatgagctttgatgaatgctgtccctaactttacctcatcagaatctcaaggaaaactgcctctgtctttctctttaattgctttggagtagcgtgtgcaatttgttttgttcatcagaaggagagtatgtgaaccgtaccactatgcatttctgtaggactacatagaaagaactcacggcaccaacaacatgtgtttttttatgtatgcttatattttatgaataaattgtgtgtgtgtgcatgtgagtgtgtgtatgtgtgtgtatgtgtgtgtgtgactgtgtgtatatatgtgtgtgagtgtgtgtgcgtgtgtgtgtgtatgtgtatgagtgcttgtgtgtatgtatgagtgtgtgtatttgagtgtgtatgtgtgtgtgagtgtgtgtgtgtgtgaaagtgtatgtgtgtgagtgtgtatgtgtgtatgtgtagtgagtgtgtgtgtgtgtgaaagtgtatgtgtgtgagtgtgtatgtgtgtgtatgtgtagtgagtgtgtgtgtgtgtgtgtgtgaaagtgtatgtgtgtgagtgtgtatgtgtgtgtatgtgtagtgagagtgtgtgtgtgtgtgtatgtatgtgtgtgtgagtgtgtgtagaggccaaaggatggcatcacccccatcccagcttcctggggatcaagctaaggtcttcatggttgtgaggactttaccagctgagctgtctctgcagccccttgagtctcatattaatagctttggggaagtacagtttgatagctgtattgagatactttaggatagaatttaagataagatttgtttatttgagttaatcgatgacttttttttttctcgagacagggtttttctgtgtagccctggctgtcctggaactcactctgtagacctggctggcctcaaactcagaaatccacctgcctctgtctcccaagtgctgggattaaaggcgtgcgccaccatcatccagcaacttttttttttttttttagtgtatttacaaaaccattcagtcactgctgcaggcagattttagaatatttctgttacccccaaagaaacttccttcccctctactccactccctgactcccagcctgaggctctgcctcctcctgtctacatggttgcctcttccaggcacttcatgtgtgtgtcagacagcaggggctccttgtatctggctctccatgagcaccattctctgagtctctctcatgttgtgtgtgtcagcccttgtgtgtgagaacacacacatgttcttctatgctcttctatgctgtgagaatatgttccattgcatctgccactttttagtggctctgtcacctggcttgctttcattcagtgggctgttgtatcccctcctttgggtggaaagaaaaaacctgaatcttaaagaagtcagatgcccttgttagagacaccataagcagagccgggctagccccaggctaatggcttctgtttggtttacccacacattcatttagcatcctttatgtgcccagtgccacgctgtgagcaaggtgcactctgagcatccactgtgggactctcgttctctaggagggagctgaatagcaaataagcgattcaaagtgaaaaatgctaggcggtgattggtattatggaggagtgtaaataaaatcatgtgagggaccagcaggatggctaagggggcaaagatgcttgctactcaaggctgatgacctgagtcacctcaccagagcacacatgcatacatatagactccacaggcatggtctttgacctctgtacacatgctgtgtatgttctagattattattattattattattattattattattattattattattattatagatcctatgagaactataccaaaagtgcaggggttttttgttttgttttgttttagtgttttcattttacctaaacctttctcaaaattctcacccaacatcaagtgcttaaaagagttatccaggtgtcatgacaaagtcctaccatcccaccgggcggtggtggcacacgcctttaatcccagcacttgggaggcagaggcaggtggatttctgagtttgaggccagccaggtctacagagtgagttccaggacagccagggctacacagaaaagccctgtcttggggggcggggaagtcctgccatcccaacattcagaaagctgagacaggaggattgttttaagttcaaggccagcctatgctaccaggttaaaatgctgtttaacataaaaaaaaaggaaaaaaatgttttttatgtgaaaaatgttcagacttgagactcattgtttgagaatctttccctgtgtcgtttagggatgtagtcacaactgcaaaacctccaatggatgaggtagcttcagcccatactctgtgggggttaatgcaagaccctcccaaactccatgcccctccgagccccacccctgcctagcagggaagccaccttcctactatgccaatccaggtcagtgcagagggaggccccaggagcctggaactgaatggagtcggtgtgtgagagcaaattaccccagttatctggccatgtagaaggctgcagcactgcctttcatgaaaaattaaaaccttgtcctgatctgatggacaggaatggacgcggcagcttgggggttgggggttcagctattgtgcatcaggtagatgataaactgcatgtttccctgactccggggatcaatggagaatgttaaagggaaaaaccacagaagaaattaaaattaaatttgcaagccccataatattgggcctgcattctaacaacagcagcaaaatgagacctgctcctaaaaaatgcattatttatccctgcctgttatcaccatgacagatgctcctcccagaggctcgaacccaagtgggttatggaaggagaccagagacagacaaccagctcacagatacagttagaatttcagatgagccgtggaagctgcgattttagactgttccatggaccatcatgccataaattgtgaggatgaaggcaactgagtgagtctaagtccaaatgaggccacaatgtgctctgtacacagcataaattttactaagaggggaaaatggggttggttatgtggctcatccctacattttttcattagtagaattttagagaggcgttgtgagtggtttggggttcaatggggaccttccacagaagagcataatttgcttccttatgaaattcactcacagtgaagtacaggggagaaagtgtaaaagagaaaggtgttctgctggcgtcaatggctggcatctgccttcgaagtcatcgccgtggaagtcacaaagaccaggcgatgaaaagtttacaataactgaagtatcaatggatatgaaatgccccctgttcgaagcctctgttaggacccacaaacagttatcaagtatccaggaaattttctatctgaagtctctgggaaactggcatttcttgtggtggaggaaaagagaaagacttttgtagagttttgaagatagcatttgaagaagaggcttggggacaagttgctgtccaggccaattaaaatctcagccgtatgtctcccaggagaagaggcggcaatggaacgttcaggggtcacattctccgttctccctggctccttcctgagaggacatgttctgtagtacttctgagagtagatgtttggaagtcactcagtgtagtttgagtcccagccttgatggtcttgaacaagccacctggtctctctccagcctcagtttccctcctcttcaagtgtgattaaaaacaaaacaaaacaaaaccctctccccataggtctaaaaggatgtagtgagatgcaggaaactgttaaagactggataaggactgtagagtgcctgcctcgcataatggcaaactactggacagaactagaagaaacaacattatattagaacggggccaaagaggcggaatgttggctgagatgcttgccgcacaagtaggaagactgactttagattcccaggactcatgtaaatgcgagcacctgtaattcaagactcagaaggaagaggcaggatccccagagcaaactgccagcgagacgagccacacaggtgagctgttggtttgattgtgagaccttgcctcattgaataaggcgaaagaaggatagaggattatctggcatcagccttggatgtgcacacacacacacacacacacacacacacacacacacactcacactcacatatgcacacacatgagtgcatacactcacagacacacacacatacactcacaacaacaacaacaacaaaagcaagagaagagaaagagtaagaaaatggtagattggtttatgggtcatttctgagaaatttaactccctcctcttagaaattaaagtcatattttcaaaggctatcagaaaccagaaactaccaacagatttgagaaatttgtttaaaaatttccccttctccctttctctatcctcttttcctttttctcccaaccccccttctcctcttcttcttctccatcctcctccttttcctcctcctccttccttatttcctcctttcctccccctctttcttcttttgttatttttaacaggtagttaagatataaacaagaataacaggcacatactatagagtaataacatactatccagctcttggttccttgaaaagagtacactggctgaaaagacgaagcttttgtgagtagattggaagtacttttgtgtgccatgcccggacactgcaggggaagccatcgtcatgggcagccttcagaaggatacgttagtttatgcagatttgcctgatctaaagatgaagtaagattctctggcctcagtcctagggactgggcatccccagccctggcttagcttggttcttagccctgtcttgtcatttcccaggttcatattatgaggcacaagagacaactagggtctcaacctttccgttacaagttatatccatgtagtggtctacagcttactcaccagatgatctactgacctgggccagtgaggttcactgtccataggaaggacaacctctggcttctaaatagaggaaatgtggtcaagtagagtagcgtgaaaggccatggagggcattgtcataggagggaaaacacggcccgctcagagatggctcacacacgggtgaggatggcccatctgacatctgatgctgttttctgtgggatggtttaccaaggaagtaagtggccatgctataaaaatttcacaggataatttgttcctccacaacctctccctagccagcttttccatgtcagccatgaatatttatgtcttgtcttcttgaaatgcttagaaaaggaaaaaacaaaactttgctctgtcttaaaattttctgagacataaaagcattggtataaggtgacaacaaggtccagctaaaaccaagggcttggggggacagtgttcaggtgctgtgcagtagttgctagggagacataaacaaacatctgttctgcccaggtagcgcgctggcagcaggataaagaagtggtttcacccaaccccagcttgatgagggagagttggtgggttacttacagaagaatgggtgactctgctgtacctctgaaaggcccaccccagggttgggtggggactcaggaaagctgtgtccctggaactccctgcacagctcccgcgctccgtccactctttccccagaaattattgttcactttgatggctttaggagaggggcttgtgaatcttgtgagtttcttgtctttccgagactcctgagttttcttagcttccagagccttatgacgccctccagattcaatctggagggagctgccacaccagacagagctcagtcagggcttcaaacccaggtgagggacagcacggtggtacacttctaggccagctttctggagacccagttggaggctcatttgagagttcaggaatctgaaatcagtctagcaggatagagactatctcaaaacaaacaaataaacaacaaaacaaacaaacaaaaaccaggctgctggtaggcatccgtgagagaaggcaaggtctaagatgatttaggaactggccatctgattctactgtggtttggggaactcagcttagtggaaccagcctcatgctagatgctacatgcttccagaggtttggtatcacgtctatttagtttccttcttactcaccaagtctctcgtctggggttttgccatctctgctcttctcctcaatggtttccttataccctcctgctggccttaggccccagtctttgcctctctctctgtccttcctccccctcttccttgtcttcctcttccacctcctcttcttcttcctcctcctcttcctccttcctttcctcctctttctcctcctcccctcctcttttttctcctcctcttcctcctcctccccttcctcttctttctactcctcctcttcctcctcttccttctcttcctcctccttcctgtcctcttctttctctttctcttcctcctcctcttcctcctgtacttgctttcaaccacaggcatgtgcacacctgctgtactgccaaggtgcttcttcagagagtcctccacaggctgccctccacccccacgcaggctctgctctgctgtttggagttactagaaagcggggcctgtatgcacacacactggcagggtggctcatgcaccaaggcagactcattcccaagcaaattctctgaagcaaggggaagctgattatgcgggaccactccaaattcaatctgctggttatgttatcactggagcctgtgatggaagcactgcccgataattcagacttgcctattacttattctttatctagaggaaataaagagaaacaattaccttggtgtgacattctgccatctctacaaagccaccttgcacccgagactgcgccagcagccggaataacgagttaaatgctaaatatttcatggagaggagtggtggggctattgaaaataaatttaaaagaccttcatgtattctggtcatatatccctggcataaaactcctccagagataaaatggctttatgacaggcggggcgatgagaaggcagagtgaggaaggtgagggaaaagaatcctgaagaatcctgcaacctcggggtgacccggcagcggggagcagcgctggaaagacatcttggaagtaattgaggttggactgctactgcagagcccttttcagtgatgaattctaaattatgaatgacaccttgttatgtccccttctcgcccacctgttggcagacgactgggaaaaccaatgcagatgttattgtgctagacaaacttctcagggacccagcctggagcttaggctcggttgcctagcttgagaaacgtgtcgtgtggctcccagagtcttccagacataaatgtccaattcactggatcctggatccaaccagggctggatgtaagtctgtgaacccttgagacaggaacacattctctttcattttcttaccactgaggacaagtcatgggactcgtaacatgaggaggacactagggtcacaaggcaacatcagctgctcaaggaatgctggaactgaaaatcatcctaggggtgctgatagcactgagtaagggagttccaaaagttaaaatggcaggacttgggctggggaaatgggttccatggataaagtttctgccacacaagtataaggatcaaagtttgcatccccagaactcatgtaaaatctaggcaggtatgatagctacctggaatccaagcattcaagaagcagagacaggggctctgggataagctggctagctagagtagccaagtacatgagctctgggttttttgggggttgttgttgttgttgttgatgttgttgttgttgttgggattttattttggttttggttttgacaggccttgcttcagtaaagcagaaagtgggtagacagtacacctgacatcaacttcacgcacatgtaaacacgcatgcatccatacccacatgcatatgtgcccgcacatgcacctacacatgtgcaaactttcacacaaattgcaggactagttcaattagaggattagccaaagctacagagaaactgctgatgtttaccgccttcaaaggaaattgctaagaaagggggaagataatttagcagtaatcacgggtgtgctggctcttcgcactgaccctggcatccacagcttttgctcactgcatcaagcattcttggcaattaaatgtgctcgccttattaatgccagggccagggagcagaaaatgaagggccttcactgcaaatagctgcctaatgttgcactgcctgcctctaagtcagggaagccatgggccatccctgtgcacagaccgcctttgatgacagctgcagaatagaattattgacacagatgagcaaagcccaacattttctgctggtctctgcactttcccactgcctaggtggagctgggacacacctccttccatatgaagcaaagatgcactagcccttgcccatagtctgagcctgcccacagagaatgctgtgtgctctactgagccctcagtgagtacatgggcgagtttcctcttgtcttttcctttggttacctgtgagtttagctgctggacatgaaataagaaaatgattcaggggccaaaatctggaccatggaaggattgtgagactgcatgagacaggagagctacttaggtggaagaggccaaagcaggtgccatattccccatttccctgaagacgagggccacctcttcccatttccctgattctaggacaggaggaaactatagcaaattgaagcaagacctactgtctgctttttttttactagggtggggggatgggcatgccagcccagtggcaagatttctctaaagagttcttaccctctccttagagtaataacatataagacatttcatttaaacatgtccagggaagagcattactccagtagctgaggactggtcccacttaactcttgactccataatcactcagcagccacatcaaggctgccaaggtggccttaccctactaagtacacctgatcagagctgagtctggacttgcaggggccatagaagggacatgctgtgctgcatgcaatagggtccacctataactgaaggcccaaacctggctctgccctgctaaagcttcgcagacgggggcagcatggagccgcctgcctggaaggctgccaagcttctgacaggctttgacgtgtcacctctatagagcacaccattgatttcttcttttctttttaaatcagagtttctccgatagtctctgaaaactggaaccagagtcctagatgagagcgtgttggacaggcaaggttatcttctcttgagagaaaatcgacagccacccccacagggaggagaagtgtccaaagcaacagggagaggaaggcctgtcaggacctgaccagggcagtgcactctgcagaagtcactctgtgtttgccgagaaacagagatcacaggcaagagctcccctgccctgacttttggtgtttttcttttgaataggaacggtgtagagacagggtcttactgtatagatggctggcctagactgcactctgtagacaaggctagtttcaaacccagagagagctacctacccttgtcttctgagtgccgggttaaagccattgacatacccagcttcccttccagagcccgtgaccatggatccacataaggggagcaatgcaggagatgatacggcaaggggctgggttcagggccagtgccatggcctgagggagcatgagaaaatcccatccctgttccagtttcctgaacttcctctgaattagctgactcagatgcaatggccaagatcttcccactctctggccaacatgttcagaccctcatatcattggtctattagctgactctaaaagtcaaggatgcggcctgaaaagttgtcttggtaacaagagcacatgctattcttatagaggtccttcgtttggttcttagcacccacgaggtcggtggctcacaaccttctgtaaaagcagttccagggcctccagtgctccagtgctgaagcacatgtggtgcacagatgtgtgtgtcagtaaaaggtaagaaagcaaagtcaaggataaccaggacctggaactcagtgcgaatagtcagacttccatgttatacctagaaattttgacctctgggcagtcgagtcaagttttgggattctctttccttctctgggcatcccgtagtttggccctccatactatgctgtcctagaacctctcaggctatctctgtaatcagcacctgcctcgttttcctggtggcctctcttctggaacctctatctgtttgttccagtctggaactttttaaaaaatctgttctaccctttccaaaatagtttgtgttttctttgtttgttgtttatgcttttctggagcacgcccctattattaaaaataataacaatagaataagccggggggaggtggcacacgcctttagtcccagcacttgagaggcagaggcaggcggatttctgagtttgaggccagcccggtctataaagtgagttccaggacagccagggctacacagagaaaccctgtctcaaaaaaccaaaaaaccaaaaccaaaacaaacaaacaaaacaaacaaacaaaaaaaagaataagaacaacaaaaaacaaacaatcaaaaccccaccatgcttagggactcaagcatctgacactcgaatatctaaatatttttgttctgtccttacactgtattaactggacaaagaatcccagtgttcttcctagtcaagtatcacaggcgatgacctcctgcctgcccagagtacaccctgcatattcatgtcacagcctgtaatcacccctgcggtgtcagaatgagacatttttgctgcacacatggagccacactccttcccttgtgtggtttccaaagtccctggatgagggcagaagaaggtgtgggaaaggcccctggcttttaactggccccgatcagaagtgatcccaaatcccattcctacccttacttctctggataggtcacatgaccccatgtaaatacaaatggggtggtaagtctctaggaagagaaaatggcactccgatactgtcatctttaagcaagcagtgtcactgatggaaagcccagtgctggggccaagggatcatctatcagtacagggctcactgtgtatgcatcaggacctgatttcgaatccccagcacccacataagaggagcacacagggcatgtgtctgtaagtccagcacaggggatggaagcaaaaggagtgtgtactggccaaccagcctagacagttagtgagtgccaggttctgtgagagattctatcccaaaattcaagtaaatagctatcaaagaagacaaccaatatcagcctctatgtgtccagaggcttccacatacaggcaccctcactcacagaggcaccgacccacatattcacggggaggggagtaaatgtgtgtcatatgtgtgaatgtgttcagcactgcctcttgttccttatgggtggcccgtggagtttatttgaaaagtattagagtcatcatgtcttgattcatttaggctgtcagtaacaggtcaacaatagaagtttcctccttgggctggaacttccttggctaaaagtgactatcaccaagcctaacggccagagtctaacttatggaacccacatggtagaagaagaaaactgacttggagttgtcctctgacctccacttgtgcacatgtgtctgtacactctcatgtctgtgcacacacgatctaaatcaattacaaagagagacatttactgctaccaggggctgaaaactgaggcgctgacagattgcttgtctggtatggaaggcacctgccatctgtgtcttcgcatggtggaagggtgaggtatgtctctggggcattttgaataaatgcattgattccgttcatgaggtctcttcttcccacgactgcggccacccccaccctccgatcttctttaaggttgatgcgtgtaacactggtgcttcactccttcacccccacgctgtgccctggcatgaggacccggcagctgaagcacttgcctctaacactgaaattctgtaatcaaaaaaaagtgatattaaatgcaatattttgtaaattaaaatcagtgtaaaataagtccatggtgaatgaactaattaatacccttggtgttgtgaagttctgcaaggacgtgtctggctttagggctttagtggtcattccatgtgttttccacaacctagctgtacttatccatcctcataggaaaggtaggtgtgtgtgtatgtgtgtgtaagtgtgtatgtgtttcttatattggctttctggctttctgaaaattttaatttcattaaaaaaaaaaaaacactctggggaagtatttcttctcacgtacttctttccccaaagtttctgcctcctgacatattttattctgtattctagaaaatccctatggctttgtttctcagtctaagtactgaacactgtgggtcagaaacccatgcttggaaagcacaaaaacaagtaaggtcatccaaactcagaaagaaatgaagcccacgctcaccctcctgtgcagatcccagactacagtgcatacgtgcatgtatgtatccaggcaagactggctacactctaagtctagatgggacccagagaggatggtattaggcgatgagaaaggcagaggatgggggaacacagatgtcacaagggacatgaaaggggaaatgaggaaatgtcatagcaacatctaacatcgtgtgctgattagagaaaagaaagacttcctgcttggactgaggggaaggctcagccggtagagagggcttgtcactgaagagctgacatcccggagtttgatttccagagcctgaatgggaggagaagataacagttcttgaaagttatcccctgatctccactcccatgctgtggctggcatacacacacacacatacacacacacacacacacacacacacacacacacacgtaattgagaaacaactcatgcttagtttccacacaccattcaaattcttgcaattctagcatgacacttttcatccttattctgtccttattgtgttttggggatatagggttgagctcttcaggccaaccttgaacttatgacacccctgaagatgaccttgactcttgagcctcctgtcagaactcccgggtgtcgggatggcaggtgtgtgccactccccctagcttgagctaatggtttcctagctagtgtgcacttttctctgattctcctttctatttccagctctctttcaccctgtagattccttctctagtttggggttgtgtttggggtttgcaatttttgttgactctcttgttttcagtccctttgtgaccctactctaaggattgtgtgttatgggtcctgtgattttcagcagtccattcacacacaggaaccgggctggaagctctcgttccagggcaggacttggaagctgacagtttccactgtgtgacaaaggctttcggttggacgctgtctgggcttcccctatctactaccttgccacggtaagaaagattccaacttccacatgaaccatgctggatttcctcttacagttccttctacttttaaaagaaagatttatttttattcatggggatggggggaggggaggtggtatttgtgcacccgagttcagtttccacagacaccagaggagggcactagatcctctggaactggagtcacaagtagttgtaagccacctagtgtgggtgctgggagtccagagcagcaagcactctgaactgctgagccatctctccaaccccctcatttccctttttaagaaaagagttctctacctcccttttcctacctcagcgagtcttccatattcagatctttgctttcccctgtgctcctcttggctgtgcctctagggttaggtgtgaatttggaggtgggctccatttccagaggcaggctgctctgcatgtgttcttggctgtgggctgtgaactgaggcatccctctgcctcatgtcccagaaaagcccttaaatcccttgatccaatgaggtttctcttgctcttagctgtcctgctttcttttttaatcctactccgctagagtcttagaaggaggtgagaagccctgtcatctgaggacctgcacggctcttaattttgagagacctgctttctgcttgcttttcctgccccacctctgggaccacaccatatgttcatatcaggaaataacctctgaccctgtccctttcctgtatccatccacaaccccacaggactccaccttttacattttgcttgtcaaatctgtccacatttctccaccttatccgagtcgttccagccttgtctttctccattaccatcgaccactagacttcctctcttaccctctgctgtcccttcatcctttgagagggtagccagcctgaaagacaggtaatcttacctttcctttccaaagctggctcctattgcccatcacaacctccaaatgccatctggccacatggtccctcactgcctttctaaccggtttttctacagttccaccactgatgaagtttcagtgggtgaccaccagcatcctcacacagcctctgccttcacatctcagtgcctgtcttcagcttgacctgcctcctccagagctcttttcaaatcccgcctagctttggggattctgtactaacagcttactccaccagggaggctgctcaatccccagctgtaccaaggagctttgtcccttcataagcttttctgtatccatcctctcggtgtgcccgccatgcagcttggaggcaatcctgtctagcacctaggtagtggtagtgtggtggtatccatttctccacagagctgtgggatcctcaaaggcagccctgtggccactgtctcctcatcgtgtgacttttcctggggagctgtgaacaaccatctattcacccccacagaagacctcggtgacagacccgagaagggattcctctcacatctagcttggggaagcagtaagcttagtgggacaatgattcaaaggcagctgcactatcagacactctatgccagcagacatgatgactcagcagctacatccctgctgcatacccaccaggtaggcagctccactgaagattctcttcttcacagcagttaatcactgttcatgtagcctggggctttttgtaagtcctgtaactctgagctagagtgtatgaatgtctcttctcttacaggaaagacaatgtctcaacttggaagaaatgatcatgtgatattctttctaccctaaggcacagccagtgatagctgggcggtggtgcgcacacttttaatcccagcacttgggaggcaaaggcaggcagatttctgagtttgaggccagcctggtctacagagtgagttccaggacagccagggctattcagagaaaccctgtcttgaaaaacaaaacaaaacaaaaaaaccaaaacaaaaacaacccaaaaacaaaaacaaaaaaacaaaaacaaaacatcacttgctagaactgaatcgccatacatacatccgggagcctaggtcaggatgccatctctacatgtcccaaactgtggttcctgtcatttcaagacagttctccaaatctgggctaactcatcaagatggaattttagggaaaagtgggaaaaccatattttcagcagcaacacaaggctctaagacaagttcccttttccgttgtgggtgctttgctggttagaaagggtctgatgccccgataccactatggcaaatgccctggtgccactgtggtagaaataactggctggtatttatgtctttccagtgagggtagctgctaagaagctgtgaagggaggccttggagtctgcccaaccccacacttttctgttcctgagatgttcctgcccttgacaggacaggaaaattagcccataaattatgagcctagaaggaacctgccagtcgcctcctgtgtggtgttgaggttgtcgcctctgagcgccccattctgaaggcaattagcctaattgcttttgttattccagaaaacaaattaagccacccaagtgtttccaggtaaggggaaaaaagcctgtactgtataagaaacatttaaggggtgtttagctcacagccagcagtcagagtaaacagccacagggccattggagggacaccaggacacttacgaggggagtagctgctggagagactagggatctgagtgtgtgccccgccctggaggccactgtactcttgtcctccattttctccctggccagcaaggcctgtctatggattctgcccctgctgcctacttcaccaggcctaccttagtggtcacaattagtgggacagttacacacccccactccaccccaagcttacctcttttccttcaaaccagtcagtcaccttccctcagccaccatgagaaccaccaaaggcaaaagcgccacaaatcagacccttaatagctttggggcttcctgaaaagtgaagagtatggctctgtctacagcctagcttcctgtactcaagctttggagaccccgcagcttcatcctgggtttggttggcacgttggttggttgttttagatgctagggacagaatctagggattgatcaatgcccagcaggcacttccataaaggtactacccaggcttcctctcattttctctgtgtgctttacgctcctatactgttgtcccagtgaatagggtctctctgtgtgtgtgtgtgtgtgtgtgtgtgtgtgtgtgtgtgtgtgtgtgtgtgtttgcttgctccttgctctctagaccaagtatgctggctcagtgtcatctgtcctgaccatggtagaaaaagcttggcacctgcagcttggtggtgctttctctttggtgtcagcctgaggcatctcttgcagtggtgcttgctttgcatctacagagcttaccattgccctaggagcaacctgagtagaaaggccttgttcattctacccatctgtggccatgtggcaaaagccgtaggccacaagatgaattttgtgggatggagggagggctggacagacagaaaaatgaatggacaaccaagtgttataggtaaatgctgtcccaaggaaaccatccacttcggctcaacttaaaattagaagctgcttgggtggagaggtggggatgttgactgtcagggcctctgttgcctatgtaccctgtgggaatgtgcagggagcaggaggtggcgaatagctgctcagggtggtaagcactatgtaggcagaggccttgctgcatctccatctattgagaaggaaggagtaccacaaatcagccattctcctcttccctaccaagaagtgcaccagtcttgtatacacccactatggggctctagacgtgtggttgactgtgcctcactcacaaggtctggtctccaggacaaacaagcctttcatggtgagactactctacacgcccttaggaagaccttgagaagtagagacaaccgttttttgtcagatttcctggcacccctgttggaaaactgccagagggtggagcctggactggcagagccaggaggtctgttttgttgccaggacccaatagtttctctaacaggggacccaggccacctgtcttaaaatctcagggggtgggagacatctcttgttcccatttgctgatcagcggcgggaacaggtgtttgaaagcataccgtttcccctccccccgggggggggggggcttcttgctcctgggaggcttatctggctgtctgagagggtccagtgccagcccaaggactgagaaacaaagactcgacttacaatttgttacatcctcgttactttctcccgcctgaggcttggcctcttggaaatcatccaggggctcagctgccttctgctgtgatctcagcatccttaacctccagtctttgatctgcatttcctgcttctgatgaaacacaacccgctccccacgccatcaggaaagtacagtgcatcttcagccagccgcacaattactcagaagtaccgagtgactcttggaatttattttagccacctgtgtctgtgtgctgctttgtctggctcgagattaaggcttctttttatacctcagactgtgcagtcctttcttttatgcctgcacaacctgtcacccagaccctgtcacccagaccaggcgatgctcaggaatcccagcctgtgaggagacccctagtggtgcaagcttgtgggcggtgggtagggtgggctcccttgcctcttccctcctagagcaagcagtagctctgagccagccccactggtgatgcagagttgggaacactggtaaagtttaatctttggttaaaaacaaacaaacgttaaattaaaaacaaacaaaagttaagacaaaaacaaaaaatatccccagctatttctttcagacaacttgagctttgtaaactggagatatattagttcagggtatttggtgctgggtggattatactcccttattctttaaccaggaaaatcagcatgtgcttagcaaagaatttttttttttcatgaagaaacagcacctttactgtccctctccctgtacgcacagtagattccagctccaactgcaagatgggttctgagccaatgggtggcgagggggtgcatggcagaatgacttaaagatttaagtgaaatccttctatcacctagatctggattgggaaaaaaaaatataaccacacctcctgacctcttccttcctctgggtgacatgacaatgtacacacacaacactctctggcatccactgccacatggtaaacagtggccgccatattggtcccccagctctccacagctctgtaacacccttaccactgatgtgacatgagcacctggtcgggttgtctggaggactcttagaacacagaacgggttgactgtctggcacataagtgctcagggttgccctggtactccaggtgaagaagttggaccttggcctcccaggcctccacctacctttcttggtccttcccatcctctaacctgctcacctagctttcttctgtttccctgagacctggccgtagaatggtgtcagccgtgttcaggccatctctctcttcttcagttaattgttctcggaaattcacagtcacagccaaaggggtatctctaatgcctcagacaattctttcttttaaaaaaaatgtaatatgtttgtttctgtgtgtgtgtgtgtgtgtgtgtgtgtgtgtgtgtgtgtgtgtacatgtgagtggggccaggatgtgcctgtggagcacagatgttgttactttattgttacttttgttgtgttcacaaggactggcatcagttaacccacacagacagataatccacacaggagaggatagctcacccatgggaaaccagagctcagctgttctactccactgatctcctggagttacagaagtttacttttccatttgatggtgctactttgtaacaacctcaaagctgccttctccagctgacatgataatacataggaatgacattgtacttggtacattgtagaaatttgttctctccttacaccacgtgggttccaggaatggaactcgtttcatcagacttggagacaagtgtcctttacctgctcaccttcttaacagacatttctaagagcggtcataccatccatactggctttgtgcccattccttctcctcatttgccctctggaaatggcatcttccatttgagtgtccgcctatgctaacatcaagatcctcaacactggctctttgaactttgattctcatggtggcatggaaaagtcagattagtgtttatgtgaaagtgttgtaccaggaggctggggaggttggacaaggggatgctctgagagacagactgttcctagatactagaaagaaaagcagactagagatgctgagggcaagtgaatggccagtagctcaaggtcatcctcagcaacttagtaagttcaaggttggcctatgctacacaaaatcttctctaaatcaaccaagagcaataaaaaagatgggaaagggggttttattcatatagtcaagcctgtcttaagggagagagagattggactcaatcacagatccaacaaggacaagtagagatttgtagtcagtgtgcagttaagttgcttcaaggagtttggtcagtgatggggagtagtgaactttactggtgatcaagagtgaggaaaagaaactgaaattggcttgatggaattctttgcttaaaactcaagacagcaagccagggtcaagatccagtagagactaggactcaaagaagctcaactaaacttcagtcaggtcttggccagcatctatccacagagtggacagtgacctgagaggcctagcacaccctccataggacactggaatagcgccccacagatgtggtgaaggtgaggtcgtcatatggattaaggcagttgaatccctaaggcctagagcagccctcctgcctgcccccagtggcatctgtcagccaggctttgggaagaagctaagttcagactttggctgcgtgtgagctcaggggccctgaggagctcagatcactgttcctgtccctgagacccacagctttcccagcccagatcctgagtaccttgtcagtcacctgttcccctgggttataaaaagccccactcagattagcccaaatgactggaagaatcattctcatgtgttgctaagtccttggtcatagccgatctgaagcttggaactgtcattgatatcaagaacctggttgctgctcctctgccatcctccccgggatgatttaactctccacgtggcccctgcattcacagacaacacaacaaacatggcagatcattctctggtgggttcacatttcattatccagaataggatgcacgttccaaagcagtccctggcattctattctggatccctttactccatgcagcaaagcaaacaccttctctcctagatcacttctgttgggtttttttgtcaaagcgttttaaaaagccatgtagaaggcaaggacaccatcagtttcccctgtccccgccaaagagccttggtcttctgttccatggtgcttttacctgcaaggtcagctacaaaactactcatgcctacagtgcaatgagtttttagggatgtctttgactaagtgtatggagtaaaaatggtgaggtagaatcaaacagtgtgtcctctacccatgctacttaaagctcacttgagtggagtagaagtcagggccacagagttgactactgataggctaaaaataagtcatatatgtcttgtatcttcacgtgagaggaaggggatgtgcacaaaccagaggttctgggtatattttctagatgtttcctagggcctcagagaagggacatgaagcccctaggctttgcccctcaagggctgtgtgcacaaacctgctttaattgagcacttagcctggtcccaagcctggccaacttctactctgagaaggttccatctgccatcagaacatcggggcagaagatgtcacagaaacagacatgtccctggcttgcttccttagtgaggcttcagcatcagagatctgggtctacctttcctcatccgtctctcccatggttgactagaacagctcagacagtctttgggagcagatggcctactagccatctgaaacccttatttacttcccctttcatggctggcagttatgtctctggcagaacccatccactgaacctgcctagatctagagcttacctcagctttccaaacgccaaaaggttccaaggtgtggttgtgaaaatatgtaagccttttctgacttgagcacgatgtgtcatttgttctcccattaagtctgtctgtattggggtgggcgtagtgtctcagatgaaacaaatttctgatgtgtattgcccaggctgaccaaatggcatagcaagccatatataaatggtacgggactagataggagtagtgaatagagtgactggtatgtttctgggaatccagacatgctcagcccatcagcatacagagctagcttatacctctgtaatttgattagagttactttggtggcttgaaaggtttttattagcttggacaaggggatacagtcttcattcacctcaatacatttctggggctgatttggagttgcaaacattaatgagctcaaattgggagattacacgggggagtcaggtaacggcagaggaaacttttgaaaagcctagtatatacataaaggcgttggataaagtccctcacaaaagtctgaaaggctgagagtctccaacattcctgaagagccacttctgaaggcaatcaatctgttatgacaagccagggtgcgtggcaggccccaatattgcaacatggagttgaaacccacacaagttatggaattctccttctagattggaaattgtaatagcagaacagcatggacagatgggatttgagtaggtgatttgtgtaaccagtctgtaattcaccacagggtttggttcccagtagtttatcacgatgaagtcacttgatcctctagaaacaaaaattcctttgtctccatgcagaatgcctttgagtgtgttttgattttttttttttttttgcattggtatcccaaatttattcaccctttactgtttaaagaaacacactttgaacatggaattaatcagggaagccttcattatagcaaaagtaacatcacagaagagggttgtctcagtttctttttatttcctgtgataaaatacacaaatgaaagcaacttagaatcgtagtagggaagtcacaacagcagaagctgggacagatggtcccataatcaagacccacaaccaagaagcaaagaatgccttgctcagctggtttgctcctttttatagagcccagaatcccagcccagggaatgatgccacccatagtaggtgggtcctttccatgtcaattaaccttaccaagttaatactctcacaggtatacccggaggcatctctcctctgtgattctaggtcttaccgagttgacaaccgagatgaacctcaagcatgatggtggatttcccacccagactagtgtgatctgaagaaaacagccttacctgaaggaggaggaaactggtctgatcccatgtaagagagggaaagggcctgagagggttgggttcatacccttacttaccatataaagaaaggaggattcagggagagtatctggcccggagctacacagccatcaaggtatgactagaacccagacccaccagggagtaatgcctatgagatttccaaagagactatcaagcatttttaaacagtgctgtgcctcatttagtatctgctttcctaagttccccataaaatatgctgttctaccccggagtctacagacagacaaggcagaagataagattttatggaaaaagaaagaaaaacaaaacaaaacaaaacaaaacaaaacaaaacaaaacaaaacaaaacagcaaggccagactaatcaagatgggaatgtgtgagagctggctctgaggacaaggagaacatgtggtccaactaaggagggccactgagacggagtcaggaaggtgcactgtaggcatgggtagttttgttgctgaccttgttggaaaaagcaccacggaacagaagaccaaggctccttggcagggacaggggacactgatggtgtctttgccttttacatgactttttaaaatgcttccacaaaaaaacctgacagaagcaacctaggagaaaaggtgtctgctttggtgcccaatgtaagggtaacagtaattcatcatggccgagaagaaatggtggctggggttagagtacagaagaaatggcggctggggttagagtacagaaccttttttttttttttttaatatatcttgttaaattaggaagcagagatcttgggacaacatgagagccagactctaaccctcaccctctttcccagagaactgtttattctgactaacctactgaacgttaaacagcttccccaacagtgccacagctgaggaccaagtgctcaaatacataagcctacctgaaacagggcattctacccctggctcccacagacgcatggccacctcacatggtaatgtgtatttagtccaacttcaaaaatcccagtactcctaacagtttcaacactgctcaaaaatccaaagttcaaaatctcttctgagactcaaggcaaactttaagctgtgaactctgtaaaattaaaaaaaaaaaaagtgtatatactgatagtacacaatgctacagaataaatatacccatccctatgggaatagggaggaacaaagaaagatggagccaaagtaaacaagtcaacacctacaccctatagttcatgtctatcatctccggcttgcagtagcattatctgtgcccccaggcggttgggtagctcctctcttgtaactttgctgcgtgtatcaaacagtgcatctgtcctagactggctccactaagtgcctacagcttttccaagttgatactccattaccttcatttctagtgttgttttggttttcagtttggttttggtgttggtattggttttggtttttcgagacagggtttctctgtgtagccctggctgtcgcggaactcactctgtagaccaggctggccctaaactcacagagatctgcttgcctctgtttcccatgtactgggattaaaggtgtgcaccaccactgtctggccatttctaaaatcttaatggtctctattgaaacttaggcctgaaatttatacactggcctcgcatggcatctcttcagggaatcttacctttacaaatagtacctgaccccagtagctttattctggaactttgatgggaacctctatgaccctgtaactcttgcattctgcatgtctgtgtagacacttcccaggtagctgtgttcaggcagggttcctggaggtgttctttgttcgggcactctcttttcaatgacagttgttgtgttttttaatgagtgtgtgttgttataccctggaacgctcagtggatgaggtcttgcacttgatacttttcttattaccttggtgcaaagtgtgaggtttctctttcatgttgccaatctgcttaccaattatagtggctttccctgcagtcagcttgtgtgcaactttaaatattctcaagctccttccacaaactacattttcttcatatttctattctacttttctcagttctccctcaactcctggcaccatactctaaatgctgtgctaatttaaaattatgccaccaaacagataaacattgtctcttctttttagttaagccttgctcaaaggacacgataagaacatagccagatcctttgccagatcatatgaatggcttctagaacaatccctcacaatttgtcctcacctccaaaacctcatgagcacagactctatgatatgcatttctactggcattctagtctcctgattcccccccccccccagaatagttcattacactctcacatttcttctacaaaccagctctcaagagctacaggccataagatcggcaaccccattcctgatacgaattctctagactagttatttttatcatttctgtgccaaatacctgataaaagcaacttaagagaggagaggcttatttttgatttacactttaagggaatatgatccttcatggtaaagaaggcacagcagacaggaatctactccataaatggtgtaactctaattatagcagtgggagtttttggtccatcttattgaatctcagtggatcaggaagcaacatctcaggctaggatcaaagccaggctatagcctatctgccagtgactcacctttgctgcctgtgccctctaaaggttccacagtcttgccaggcatcaccactagttgaggaacaaatgttcaaacacattagcctgtgtaacacattttacattcaaaccatagcaacttcttcaataagtgagagggtggttatccataggcacagagctcatgattcaagtgtgtgacactcagggtccattgaagccgaaatgagtaaaagtcagagcatttcggtctacagagcccacactggcctccagtgtgaacacgctggactcagatgacctgtagccagagaggcgaccttgagcaatggagactcacggggctcttttgtcttctctgtgctccttcacctcagactataaactgcttgaggacatagactgtcttttggttttcttgtttttaattctccagattccccagcagctgtttggtaatatccactgaatgaagttactcaattttaagagggtttctgacagcaaaaacatttgaaaaaaaaataacactatgtaaaattggcacttgaaattcaaggcaaatgtctctttaaaatctataatttagagatctaatcctaatcatggctcttggtatgggagtcggcatgtctacatgcagccttttctgggaatggcgacggcgggtggggtggaggaacagggatgcttggcagcttccctaccaaactggtggaaaaagagctgccctggatcctggggtgatggaagcagcagatgctcttgggaacagtttgtgggtttgccctgttcctcattttcagcctcataataaatgtacaagctccttgctttagccagccagttccctcaaaaaaggagccaatggtgtgatccccacagtttctggaaacccactaactgaaaataaacctggctatccagcctcatgtacctacagcttggatggagctgggggcttctggataaggggaagggcaatgaactagtctcagaggctcaggattagcatcaccctgacccccaaagggctgagagctgggtgcctcccttctgcctgttactctcttccttccctctggaacatggcatgggagcttaccattcacttctgccaccctagagctttctagagtgtcccctgtccttttgggaggctagccaagtcactgggactcaatcaactcaaaggcatcttccctttccaacctccttggatttcatagccgtgcccttagcgataacagcagtggtagagtgggtcctcatgtccgtgagacccctatcattgatatgtagatgactgccctctagtgttctcccttaaaaccatgttgtacccactctacagatgaagcatagctcagaaaggacactggcctgatggagacttgggagtcctaaatccacctccattggaattcccaggagggagcctgtctcctgattctgacacataagccatgtcatgaaacttggccagttccatgactgggccagcttccctttggggtgaagataagcagcaatgtaaaaggctgacctatcacccacccccccacccccccacaaagatggcaatagcgtcccctgttcctctgaggtgtggttgaccaggcttgcaaaacccacagctgaggtttcaggcttccattactatttggttaagaacataatcactcttttttattagtacataaataacctttttttttttcctcaagcaggcccaaagaaacgaaacatagatggtgataatgttcaaaatgtttacctacctcctctctgaggacatcagattagccctttctgtgagaggaatgtgtaatctgagggaagacagtatcagcctcttgatcttgcaatacatttttcatatctttgccacaaaggctgattattatcatgacatttttaaacaatgactctcccccgtgcagaatggaaaagaacagagctcaatgtatagatagatggacggctgcttgttgaaggccagtctgtgctgatgggttttcctggtgaggtcttcacccgggggaaccttgtgattaacccctttattgcaggatgtgattctgtgtactaattgggatccacgctcggctgtatgccttggcctttttctctcttgattaatggtcccatccgatccctccaaggtcactgtgtccccttctctctcagaacatgaaaggatccttgattaaatgacaatatcagattagacaagggaatatacagggaagggcttccatacactaaggcaggggtgcagccttgatgctgagaacccttgtctaggaggccatctgggaccctgacatgggcagctgacagacatgtgactgcctccactgcctgggttggctaacatggaaatgacatttctagaaggctcctgtgcgtggcttactcatctcccatcaggactttaccactctacaaagggaaggtgttgactaaggaggacacttcagaaatgagcaaaggacaaagatttcagacacctctagcatggcttcatgtgttgggaaaatggagtgagtctatgtacccacctgtgtgacaacttgtcctcttgccgagtgccccgcaactgcaggctaaggatccgcaatgggaaggatggaaagccaccagcaaaggagaggttaacactgcgggagctgctctgagcttcatggcatgcagcactgggcacagccaggccatcttgcagcatagttacaaattcccctgcagtcacagggagcgaacagataaatcatgaatgaatttgaaattatatttccttctcttagctttcttcctgcccactcctacctcatccacctactgaccccagaaacaatgttatagagaaattgtaggttgcaaatttcatccaatgcatttagctccatcctcactgagggtctggggaagggaatcccggtcttacttcatgaagcttggtgacagactccctctccctcgctgggtagagatctgaagggcaaagcccagacaacaccagagaccctgtggagtcagacacaagcagagcccagctgccctggagagtcggaggatgttaaggcgtatgtgcttccagagaacgtcaacttttctcttcctataacaaaatacttggcaaaagcaacctaaggagagaagaatttatttgggctcacagtttgaggctacaatcgatcgtgtcagaaccagtgggaacatgcgaaagattgtcacattacatctgcaaagacagctgaatgctgatttagcttgctttctcttgtattcagtccggtggcacccacaccaagtgagggtcctctggaaacaccctcagagacacagctcttctccacaatgattctaaaactcatcaagttgacaatcacagtgcctctcccatcatgtatcaggcatgctgggatcttgcctcccatgtcagatcaaagatttcatgaggaaacacacaggtttatgctgctaatgtcactctcctgagaacatagtccacagccacgaacagtgagcaagaacccaggcatcctgctacctgagagagatgcagactaacctgtggtccctccatgagcttctgcaagtatacaaagcattctcagggactctgctggaaccccctgacacacagagcaagagtaacacaggtaccccatgagcagaagacccctgggtttccatgtcaaggaaccccactctcaggctataggacagagtggcccaaggtgggagtctccttcatagttctatgtccccaattctttaccttttttttttttttttgacaaattgcaatcgtcttcaagacattaaaggttagatcttgggtcaaaatgggtctgctgagtcagctatgtgactccaacctttctatgtggttttcctttaaaaaaatatttttgttgttgtttttgttgttgttgttgttgttgttgttgttgttgtttgtatatgagtgtatggaggttcccgcagaggccagaaggtggcataagattcccctggagctgcagttacaggttgagctgcccacctgatgtgcagggagccacattcctgtctgttgcaagacagcaaacacctttaacctctcagccaactcttcagtgcatccttcatttttcatactctttttcacctaccctcagagaccctctcacctatgctccagctagtgggcatccggcccttgctgaaaaggcaagcaatataagtgaagaaatagagccagtgacacacacacacacacacacacacacagagttctttcatctcctgccacattataacagcagttataatacattaccttttccagagatcccggtgtctaaaatgcccccatccattcttccagggtaagcactgctgtccactgctttcttgagagataaaaatacatcaatataatatgtgtagtgttttacaaagtgatgtgtttagcttttctctatagcaggtactagagagtaccaaagtaaggtgcctggaaggtgggtctgttaagagggatgaaatcaaagtgtagggaagtcactggctctctcagctagccccttctccgttctaggtagatcatacatgttacaaggcaggggatctgtcatctcaacacttgctttgttttccagtgagcctatcatgtgtgcatccatttaaccagcccatgttgaatgaggcctcatctgtgaaaagctccctgctatgactgggacactaaggcctgtaagacatgtccctgccttctacattgatggtgtatctttacaaatccccctctctagtaaaatgtgccttagatgtacagacccacatttgctccatccactgtgatgtttgaagtgtctcagcattgtggaacggttaaatgtaatcacttcactagggccctgcctcacagagctgtcatgtgtgtggggaaagacttaaggtcttctctgtggttttcaagactacaacacatattcattaattcattgtcatgtctcatgatagatcatttgcccttctgcctcctgggtcactgtgcttctacatcctgtgaccagaatttcatcagagctactcctcagcctcatagtcaccattcagttctctgctttttataagactgcattgtataagattccataggtagctggatggtggtggcccacacctttaatcccagcacttgggaggcagaggcaggcagatctctgagttcaaggccagcctggtctacagagtgagttttaggacagccaggactgcatagtgaaacagtatttggggggggggagagattgcacatgtgggtgagatcacaaagtatatgtgtctatgcctagcccatttcaggtgacatcacatcattcaggttgtcacaaacatgacacaatgtggaggaggagattgtcaacaggaaacccttgagaacagagtactatgaggggtgccctatgacaaaagggagtgtttgctaagcttactcagggctcctgtgattgcagagtccactccgtagcaacaacatcagcagcacacagcaaacgacaacaatcctcagtcactgatgttagtcacagcggtgaaatctgctggctgtttcccttggtctgcagggtgcttccctggcatgcacaaaaccctgggtgccatccccagcctgtaatctcagcagttgagagatgaagacaggatcagaagttaaagggcatcctagctatgtagcgagttcaaggccagcctgggatacagaatgagaatcaatctcaaaataaaacccaaaccagccaaacgctaagtcagcagagcttaggtgatggtaagaattgaagggacctgctgggactagatgtcccaaggtggggtggtacccaatgggggcttcccctctctgaggagaaggggggagggaagagggggatttgtaagagcaggattagaaggacaggaggagggggtacaactgggaggtaatgtaaataaaaattatgagaagggaaaaaagaatgtgaaggcatgaggtttggctctccagcacccaacaaagtccataagtggagaagaagagtaaggaagaaaaagctcatggacaaggcgtgtgggcagatggccagctcttgccttcctgcgaccttcgtgccccttgttctaagggatgatcttgtatgtgatatttcaattaagatgtgtaagtcccagaaagttagtgtgaaagggacctcttctgagaagtgtgtgtgtgtgtgtgtgtgtgtgcatgcatgtgtatgtttacatgtgtgtgtatgcatgggtgtgtgtttgtatgtgtgtgtgtgtgtgttttctagttcacaaagttggcaagtcacatcccagtgaatctaagaaagacacaaatgatcaccatttctgtgttgattaaaatcccctgtattgtgtcttagatgtagtcagcctccttccagagctgaccttggcctgtagcttgggcccagggggtgccaggagagatgtgtactttgtaacctgacttcagtgtataattaatgtattaaaagtagaccttagaagcagggacaaggagaagcttgtgagactagggggacagggaggatgtatttaactgttcaaggacagtgtgggataggttctgaggcgtgaggttgagccccctccggaatcctctcgcagggtactcagatgggatggaacccagccatgggagtgaggtctcatcttttgacaaatggcttgtgtgttcaggcacccatctgccacctgtgtgggcacctggactgctgacagtgcagattctgagagagggttttcatccctgcagacctgccactaaggggtgggggtgacctagcccccttgcagacagagccggaccagcgctgtcttgccaactttcatttttttcaaagctctgcatcttcacttatatgtatgtggtttttgcttcgtaatcagattcccaccaaacatctatcattaaacctctgttttcacaatacatgctttattgtaaaaccaatttcaaccgagtattgcagatgcagtgcgattttcatgtcttacttgggttgtctttatttctttgctttttgttttgggttttttttttcctcttcctcttttggttgctagggtattaaacacttgaggaagtagcttggtagtatctatagtgtggcagttttctgagtaagagattgcattagccccttgttatatatttgggcagattgtatccatcatggcttggcaagataaatacattaaaatgtgctgattgaggaagaaatgagacacttacattgctgacagaggtttacgtctctcttctgacggatgccatgctatggggatagctcatacttacccaatatagtgatttccatttcttacgggagacaaaatgacatcggagcaggctaggaaagcagttcagttggtaaagcatttgcctcaaaagtttgaggacctaagatagacctccagagctatgtttttacaagtgtggcagcgctttcttgtaatgctagggagagtgaggcagaggctaaggctcgctggccagccagccactcctatttggtcaactccaggccagcaaaagttcatcttgtgcattcacctgtagctgtggtgagtttgtgcatgcagtagttctgtcatgtccaaggtctttcctccccctctttcacaatggtccctgagctttggcgtggcggggtgggggatggaaggggtgatacagatgttccatttgtagccaagcaatgcactgacacacctgctctctgtgcttcgaccatttgtgagtttctccattaactacatgatgaagtctgagtgcaggcacttgcctgctggtgaagagatacaaatggagagggcagactaatagtgataggctcatccctgggacccgtgagctcctgaacaatggattgggggccagattaaagtgccaggtatgtgtttcctcctgtagagaagaccttaagtgcaaacaaaaagtggttggttgcctcgataatattaatgccactcttgtatccatggttacacatcccttgccatgctgagcattgctgtagttcacagggttcacagctgctgatgacatcttgccctagaagcatgcgtagcaccttctagttctgtgaaagctagccagcaagaagaaagcttcctggtcagtctcagcattgtttatccacgttcttacataatttttttttaagttgtaaaggaagctagagatggcttgttgttttcatgcattgacgtggttggcatgaatatgaacaatgtagtgatcatggaggcttatggtatttctgactctggaaggtagagacaaggatccccaaagcaaactgactagtgagttctgggtttactgaaagactctgcctcagtgaagaaggaagaacaatgagaattattcaaccacctgtgtctgtatagacttgtgtgtacccacaacacacttatgaacatgcatacatgataaacttgcatgtattcacatgcacgcgcgtgtgcgcgcacgcacgcacgcacgcacgcacacacacacacacacacacacacacacacacacactgtaaaaaaatcttgcactccctaaaagatacaagacatacatcactgcaggccatgataatggtgagatgcttgccagcccttcactgtctcttatctgctcagcccggccttttcttgggctatcacgagacagacccaagagtcatactcactgtgtgccctcataggccagggtgggctgtggctcccactaaatctatgtggcttgtcaaactctttgaccaggtcagcaactgtggctggccaggagatggggtgggccctgggacccatccgagagtagacacatgatgtaacatgatgtaacagagaccctcagctccaccatgaggcccatctgcctaggtgcttggaggctactcccagggatgagtttcatgtctgggagtaagaacaaaagtccacctgatttgagcacaggactttagactggaagcagtccttgtgcacttggataccacgctgtacttgctttaggcatggcagggatgacaaactgcagccttctggaaaggtggccctggcaaaccatttatgagcactcttgctcttgtcaccttccatatcctgaccccaccttccagctgcctggattgtcatggggtggagaagtgtggcctaggaggtacagcagagcacactgtggtaaggcctgggcttcaagatagaccagtttgtttatctatttattcacctacccacctatcatttttccatgtatgcatgtgtgtgtgcatgcatccgtgtgtgtgtgtgtgattcctccctttccaattaattaattttatagattacatattatatttataaattataaacttataaattataaatatacatatatgcatatatacacatacatatatttatttatttagaggcatggtctttcactggtacagactcaccaggaagcctcagggatctaccagtctgcacctctgcagtactgggattataaacctgttccatcttgccctgatttttatgtgggtcctggaggtcaaactcaggtcttcatgatggttcaacaaggcctctgaccactcatctttctccctccactttgtgcattcatttctgagcatggatgttctcagacaccaaccgtgacccttcttcaccacacactgtttgcatgacccgtccccagcatccctgtgagcctcagcgagctcaaagtgctcttgggaggattaaacactcattggccacagcacagaggaagcctgggacaaagaatgtcactcactgctaagtctgtctttgagatgtgctctgaggactgcacaggtgtgtcctctacgatctctctgggcaggagtagcacaggcacaccctactcaatgacctgaagtctcctcagaggttattgatgaagactattgtggtgtataccctgctttcttagagaagaaaaataaagaccttcctactgtagcagaggaactaagaagactctgggaagtatagcctctgcatttcccctgccataacagctgtctctaaggctgaggagatggctcagttggtaaagtacctgcctcacaagccagacaacttgaatttgtgtggggtatggtggcacacacttgtaaaacacacacacacatacacacacacacacctcccagccctttgaatcctttctgaaatagatgcctacaaggtgtaaagttttattaaagccagctaacaaaacccttccagcccggctgtgatgattgtgggacccagagtcagttcttcattcagtgcttgatctatattaatacccatagttcatctgtggttcaggtagtcggttctgaaggcagactgtctgggttcaggtcctgatgctgccacttacaagccaagtgatctaggattgattgcttagcctctctgagccccaactcccccatttacaaaaaaaaaaaaaaatagacctatttcctaaggtattcctgagacttaaatgagtggatgtgaggcagcctttcagtgtgaggacttagtaaagcatgtggtgtgttagctattgttactctttcagggggaatttccatctaaatgagaaatgtctatagaaatcgcctgcacagaaatctctcagctcaagaaaatttcccagggccgcagatccccacagctaagtgttactctgctgctttcttctcctgcggtacaacacaaaaaacacttgtcatcttgaaaaaaaaagatcagctctttggtttggtacttgagggagatgagcagtggatgaggcagaacagcagcctgcgacaccttggacagacttctcctgggggcctagctaggccagatggacttcttacattcccaaggccatgggagtaggcagctaccccaatatgctggcaggttccagttgatggaggtctgacttctggctcccatactgtggtcctagcgatagctttcagtttcaagactttcatatacttataggctattaatacacacacacacacatacacacacatgtacacacacatggaagtgatcactcaggtgtgtgctggtatgaaactcctagttcctgtaagtcttatatgctagaaatgtcttcctgcctaggactgtgtgatccctacacaaggtcaggggccctggcctccacatccccacagcgcagtatatggaatgcatgccccctctcatctctgcaggcagatgctcctgaataagaggaaatacttttcatttgtacttggagtatcaaacacagagctcacgtacctagcaggccaaacagaccctcttctccttggccacggacactctggtatcttacaccttgatcaccttggtggagagttacagccccctttacttggagagaaatggaccaatccacggcttctgctggacttaacagctcttctgccatcagttagccaggggcctcagagaagttccttctgccctctggccactctgttctctgtgtgactactctgtactcagatatgtgtcccatagaccctggacaaattctacgagagagagagagagagagagagagagagagagagagagagagagagagagagagcagtagccacagagagagagagtagcagagagtagtgagtcatacatgtttctgttcctgtctcagccccgttagcctctgacagccttggcattctcagactttcccattgcatacagcagacattcaaaggagcctgtgattagaccagaaacgttggattcagccattgcaggtggtgccaatcagtgcgtatgtatagaccctacctgccacagaggttcctttgcccctcaggaatgtgcaggcactgagaaggcgccattctccacactgcccaggcccagagcttattccacgtttcccctcccactcccttgccctcttcctctgctccttcatgctgctttagccaaagagccgtgtccacctgggaatccctggaacgcagggcttgtccacgtggccttttggcaccgcctggctctttcctcagccatgaaagcccagccccttgatggatctgatttgaaaaggcgtccacagactgctgcgtcaagtgggccatggtggcatggaggtgacagatgtgaagtgttactgaggatgctgcactgagcaccacaccatcttcttttgtaatggagctaatggtgctcctctgaggacagctgcacttacatctgatgttcagacgccattatttaaactttatgatgggggaacatgcctgcccgtccacttgcagcatataaatcatgtcatgcactttttctaaccccaattctcttgaattatgaaagatagacaagaccggtgagggttttcaggatttccctgggcagatagctaaagagtggtagctagagcccccaatctatcaccactgctaaggcacggaccttgctgaggcttagggctttggaagggctgtaactgtaactcttagggagccccaactatgtgtcatgaccctgcagcccatcagcatccagagtctcccctggtgaaagcttgcatgatggctttagctttgcatcccaattgttttccctggggcacagggatgtcagacccaggcattggtgtttggtgaagaaagtggatgagggccttacctgaagagttcttggaatcttggaaggtagcctgtaagtgggtgttccaaagccacatgtgtagttcctgtcacacacacagaaaccctcgcatatacccaagttgaatttggtctaaacacagaaaacaaagtctggattgtaactgtctctctctctctctctctcattctctctccctctctctctctctctccctctctctctctctctctctctctctctctctctctctctctgtgtgtgtgtgtgtgtgtgtgtgtgtgtgtgtgtgtgtgtgtgtgtgttgggcatgtgtgtacaggtccatgccctgaggccagaggacagcttcatctatcacaaggttcttcaaatggcctgggatctgccaagtagactaggctaattagccagtgagcctcagggatctaactttctctcgaaagctatgggattacatgcatataccatcacacctggatctgagtatgtgtggactttttaaagatttatttagctttattttacgtatatgagtgcctgcctgaatgtacgtctgtgtaccatgttcatttctggtgcccacagagtccagaaaatgtcatcaaatcccctgggattgaagttacagagagttgtgagccactgtgtaggtgcaaaggcagcctgtgctcctaaccactgagcatccccccctgctctgcctggctttttgtatacaggtctagggactaggacttgggtcctttatgcttctaaggcaagcactttaccaactcaactaactctcattttccccaaattttaactttatgtggacacaggtgaccagtgtctccccagtaaaggcctggttgagcccctagggcagaaatgctgggatcaattactttggaatcctttcactcaaggcaaaatccaatttgccctccatttcattttctatgaattcatacatttgccaatacttaaaagccctgcagcaaaaatgaattacgcagtgatgctggggaagagagattcaaacagcattcagtgggaaagccagcatctcagaagcacgcagctgtccttatgggctttgaaaggctagaaagaaagctgacttggggcaggggtcactgaacccctgggctccccctggcatgcggctggatgtcctctcaatccctcaaggcttccagttgctttactgtctcatggcccagggttccggttcctgatctacttcataggccattgcttgtgccttctgtctaagactgttcggtcaaggttacatgtagtcttgctgactctgttgccccaaatgtcataccagcctttccccaagtcttttaaggtgcctctatacccagttccacagactctacttttgtgcttgtataaagatgccctcctagtctctccctgcaaccccaccacatgaccctcagggcaccaggcccagcctgctatcggagtagtcaggacttcttacaacctcacaatgcatctaatgccttgggtgacaaggagctaaggacagggcagagccagcacactgggcctcgggaaccactgcgactcatatgcagagatgtcccagggatggaagaagaggaagcccttttcagagctaccctcaaccccttgtcttccaagttggtctgtttgcctggaggccaccactaaggaaactgttatctgagaggggagaattgcctcctcagtgtaactagtcaattagacatctgggtgtgaattagtcccttgattacctgcactggtggcagctgtggcattttaagaggcttccttatggggacctgaatagaaatccctgtctttgtacctttgggtgtcaaattttagcaccttctccctctgagggtttaggggagggggggaggaacccaggctcttcagaggccctgccctcagatttctcaggccacctgtgttgtcagtggagcacaatccacagctcagccagccctgttggtctctctctgggatgaaagcagcgtcctgctcaccttggcttcattgtgaggttcctgagcttagctaagggtcagcaccacgctgctccccactgagaaccccaagggctgccagcacctgacttgacccctaagcattaatgaacaaacaccaggagtgaactgggcatggtggcacaggcctgtgaccccagcacttgagaggctaaggcaggaagatcgcaagttcaaggccagcctgagatacgttgtaaaaccgtgtctcagaagatgaaaacacacacacacacacacacacacacacacacactcaggaatgacacctgggggacagcagggacaaatcatccatgcagctgtgctctgggtgggggtccaaatggtgtggggatcactggcaaggtgggcactgagtccagtgagctcccaggtcatggagcaagatgggaaggcctgtggaaggtggagagtgtagagaaaaagatcgaagctacagctgggccaacagaagcaatggaatccattagcggggcaccctgaggagggaaaagagcatatggcctgggtggggacagatgagtgcaatgttgtctcctgctactttatgaccactttttcctggtggcacttaattgaagtgtcttctcacattgccagcatgagcaacgactaaatacagctacttccacactcatctgtgaaacgtgaggtactcacacatgcaacacgcaacatggggtgcaaataacagtttcctcagtgcagttatttgagattaaaaaaaaaaagattcttgccatctgttccaataaagaaaaaagaaaaaaaatcagttgaaatttaggacgtttgcgtgtgtgtgtgtgtgtgtgtgtgtgtgtgacattaagatagcattctaaagaagatctcatgtgtatcatggacatgtgtatctgagctatgacaggtgtgagttgtagaaatctgtgcccaaaagtgatcaagtatatttttctttccctagtgccagccagggtgcttctctcatgcataggctttggaaatttccagatcatgcactatatactgggggcagggggtgcgtgtgtgtcaaggcatgtatgcagaggtcaggggacaacttcaggtgtcattctttgcccgttactttgagactgggtcttgtctgaaactgagcctttctcattcactgattgtcagccagactagctgactggcaagtttctggtgaacaatgccggttttcctgactctgcctcccatctcctagtgagagtgagctgaggttacaaatgaatcccacttttatgtgggttctgaggacttgaactcggctcatcaggctgtgctgcaagccctttacctagagagctttctcttcagccctgccgtatattttactgtagctgatgaggggaagcctccagcagaggcagaagccatagtgatttagtgggaacaagtatcctgggctggcagcttagccacatgaggccctggacaaggcccttcctcactctgtgccttggcttcttcacctgtcatgtgggctggtcatagcatgacatcagataaggccatcccagtgccttgcacataagacaaccaccagggctattctcaccacttctgtgctaccccgatgagtgcacatgggtggtgcatggctaggggatcctagaatggcccatatcactggatcctgcaaggtaaaaagaaacggtgcacctaggtgagccttcctactagaggtcggtgcctccctgaggtctctcagtacaaaggatcaatgcacctgagagcaaggtctggtgagagtgtcaaatgccagaaagcactgagccacacagtgagtgaggaccagggacaggactggaactcggatccaccctccaatgaggggtcggtggcatgtggacatagcttccggagatgtgcgctaagggaggaaacatggtggttgattttgactgagaagttggccagatttggaatgcactgagggaagtggtggagcccatatctgggtctgtggtggagatctggaagacagttggattgtggaggctgggatctaatgagtagattcatcaatgggtaggttgttcgtatatgatattactgagaggtggtgaaaggtagagttggagccgagttaaagggactgtgtcactaagggtgcatctacctctcacctgggacctccttgcattcccctttctttcctccctgcctgggaaaaagtagagaagagcccctaccacacacccctgcaatgatgttctgcctgagtacgtgagaccaagtgactgtgggttgaacgtcctaaaactctctgagacaaaataaatgttcactccgtgtagttgctgctattgggtgtttagtctgaacaataaagaagtgctaggataaaggaagctttgtgaagggtttgagaggaggctgggctgtgggaaagaagctactagaaaagacaacgctggtcagttctacgagtaggcttaggcatggcaataagaccagatgtccctgagaattctggggagcaaatgcccacagatccagacattgtgagggccaggagacaagcacagagtctaaagcagatgctgccaggcttgcctgtggaaaagagcctaggggtttggtggggctcatgtcaccctggatacctcccaaagaggaatagataggcagagattcttcttgggagaaatgaaggtcatagcagttatcagatttatgttccaaggcgtgtctctcagaaaccaccagcccttgcatttataaagcaagtataagctttcgacgccctctaaaaggttaactgggtgcttgcttcacccggtccctgcctgtcatctgctcccacagtaaatcgtccatgttttatagacttccgtgggatttgtttcaaagaggattgtcttttatctctttcttcaacactccaagtgtaggtctggggaggcagctcagttgctaaaatccttgctatgcaagcttgagaacctgagttgggcttcccagcacccaagtaaacagtcaggtgtagaggctggagagatggttcagaggttaagagcatgtgctgctcttccagaggacctgggttcagtgcccacatggcagctcacaactgcctgtaactctagttccagaggatacaataccctcttccagcctctgtgggcaccgtctgcatacatggtgctcaaacacatgcaggggaacactcatacacataaaattaaaagaattaaagattaaaaaggggccaaccatagtgaaatggtaatgcctgtaatctgagcactgagaaggaactagcctggtccctggagcttgccgaacagcaagtccagccaatcagctccaggttctgtgggagactgtatttcaaaataaaagatggcaagcagctggggaagatacccaatattgaactatatcctccacatatgtacacgcccacacacatagacactcatatatatacacacacacacacacactcacacacacatacactcagagagagagagagagagagagagagagagagagagagagagagagagagagagtataaactcaaagctcacctaaagaatcctcaagaatttccattttaatattgccacagccttgataagcagatgtgcaggtcaggaggaccctgcagagcctgtctgcttctggcagagaaagcccacggttgatacacaataagacatgcagctacccacccccaatttgtccttggaaagtcagtccacccctagctgagggtagaccagaggctccaatgtgaagctcctgggtcactagaggagagatgtactttgctctcaagcccttcaaagattgcctgggagtctgggacagtgactgagacagtgtactccaagacttcggccatagatcagggtcaggggagggcactcaagaggctagtcctgagctccatatgatatactcactagggaagtaatctaagggtacccttggctagccccagccatcagatgggtagctgtagaaggacctatacctgcaggttaggcaggctgaaggtttgctccggagaagcctctgccacttccaaaccacactcagcagcctagccaggctcctctgaagaccatggacaagtcagatgggtctgtctatctgtacattgtggtttttcccttctcccactctctcagttgtcttgtcattagcaaacatttctgtcatggctccagtgctgtagggagctgggaaggtatctcccatccagacttggctccaacctccacgtactctggtctgactagtgaacaactatagccacacatgcatgccctgcccagaaagaagaaagttaggaacagtgtcttcttataaagggatgtggaaaccaaaagccagcaagggtcttgtgcaaaggaatgtagggtgtggtcatagtagagaaccatattcaaaagcttggtttggtggagcaccgtggcttgcagcattgctacgagcaatgaaattgagttggaatagggtgcaagaggcaaagacaggatagaacctcccctgatgttctctgagacagtgacaagtcttggaccctctcagaacaccagactgaagccacagagcgactagcccagaggaaccaggaccactgatgtacccaggtctgaccacatctggaccagagaactgggtcccagaagtattcatcagaagcctggccctttccctattggaaaggtctggagggttagccacatgcactgggctggaggaacagacttccttacagaagttgcaccaacaccagaaagtatgaaagttgagtctccaatttggagactttggataaccaggtgttctccttttccaggtggcattccgtaaatgctgccatttctccctcaaagcagaaagtggagaatggagccattcttagccctttctcacacctggaaaaaagacaggaacgatacaataattttggacttcaaataaatttaaattccacgtttggactccaccatctctgtttagtttttaattattgtatcatcctcacctgtcacacacaagatacttgctgtgcataagacagtctgcaaagggaggcggatctgggcgggaggcatggtggcccatatgggacaaatgatattgacatgagtatatttagacctaactgttttctgatgagttaaatctggatatgtattgttcaaaaacaccatatttgatgtaatgagctgggttcacatttcatgagataaacaaaatacctaccgtcactctgaatcagatatgttgtgtgtaactgcatgggaaacaaagtgacaagggtggtgggtgaagcatggaggtggtgacagcctccggtcacttgcgtgatgcagccttgttcagtgagtgggtttatcctgccggctctggaagcctgactgaggctctgtgggtgacttgaaagaaaagatggcatgaaatgtgggggctgcaagactttccagggagtcacagcacagagacctttgcgtttcttccttcctacttctaccagggttcaagatgacatccaactaaacaggaattgtgttgtttgtttgtttcggctgttgttttttagtggataggttctggggaaatggataggttagtaaatggctgccaatcaaacaagaggacctgagtctggatccccagcaaccacacacaaagctaggtacagtggtgcacacttataacccacgcactgggatacaggcagagggatccctggggctttctggtcaaccttcagctagccaaactgatgagctccagcttcaatgagagaccctgcctccaaaagaagatatgatggagaagcagttgaaaaggacaccaatgtggccttcaggcagggacactcgtgtacacacaaacacccgcacacagaaatgttatacatagataaacaaacaaacaaacaccgtgctatgttgtactggttttgctgaacatacttttattgactctggttgaggacagattaaaacttctccccttaattttgatgaaaagaggtagatttaaagtgcatgcgtacacatggatacagcaccagcatcacatcccaagaaagctgcaccagatgagattcaataaaaatggatctgactccatgcaggcgtaaagctacttagcacctctcactctgctgaccagatgcctagataagcatatccatataattagcaacaaagagagattgttgggagctggttgggagctgggagggatgtcatactatcagttttcagtcatgtggatctcttgttgttgttcttgtcagagggagaaagatagtgaggctcttattaccccatgatgcagacgtacagccatccccaggcaatagcttatcaaaaggttattcctacttcagatcatgagatatgatactgcctagtcctgctgctggtataggcttctaggaaccttattgtcagctcaaacccaaggcatgagattctcttggttcactgtaaaaggaaaggcaggtcacttccccaccaccccaactccccatcgaggacaccagctactgagacatgactggaaacatggcctcctaccctcagagcagagatatgacaagagttctatttatgagcgtctacctacctcaggcatgtccactctggactggcaaccctgcaaaaaagaagctggactctacaagggaactgcatctgactgctgtgtgtagatcatagatcggccttgttcactgaggataggaagccgtgggctccagtgccagtgtcagagctgggagtcagagctgggttctctggttctaaccttgccagccacctctatagcctggaacaagtgactccttttcagcagtcctgtctgtcgctaccagttactttggcctcctgctcaggtattcatcttgttctgccccatgttgatggattatccactcagagctgcctttgctatatctccactagacaacttttctcattgtagcactcagcagtgggccaccctggcttcttggctctcgctattccttacatactcaatatgtctttggcagctccctgcttccccctgggactttgccaggatccagggactctctctgtgcactcacaaggcagaaatagtgtaaaagctgatatcctcgggaacagccctccacagccataaccatgcattgatggataagcaccaactccacaggtgcctgtctggtgcaatggattccacctgcatctcccacaagagtctgcccaggagggccccctggtcatggtggtggcctgctcaccagtgttacccttgctggccactttctatctcttgtttcatcctccaaacctctgtgtgtgcttctggaaccatcttctaataaactccgtgcactcatatcctctagggcagccatatatggcagtactaccctgtaaccctagcactcaggagtctaaggcagggagatggattctataagggtagcctgggctatatagcaagaccttgctaaacacatacataccctactgaagcagtaacctgctgatccttcagggtaaccttgaaccaggccatgctgataggcctggatgcttcctttattatctttgggatggaactgaacttgtaggctaacaaagaggagtaagctactacatactcaccaggatacatgcctcttccatgtggtattgtagtaaagaggccagagaaggctgtaaggtccggttctcatgtgatggctgagagtttatctctatttaccttatttcttctcttcttagctctgccaagagtataagcccatcaccaccctgttacagtaccctatagaggtggtccagccccatggaacccttgccatgtccatccagaatagatgatgggctgagaccagctgcttcctgcatgaaggtgatgcctcagaccaacccaggcagtgccatgacagctttgccacccagctagctggaagggctcaggacagccctaagccatgttgggttgattgattaggactctgtgtgggctcctgagacagaagcccttagatgttggtgtgctttgtgatattgccttgaagcccaaacctatttcagctctgagcctggtgagacaccttatagggaccctgcgctgtctgtctgccaccacaaaagtaggtacctcatttccctgtgtctcacgggatgctgagccccttccctcagtggtacccaggagttactccatgagtcactgtagcccaggtatcaggaaccatctcctcttcctgaccagctagatctggcattcattcttccaaagccaagctccaggacaaccttccccgcttcctctgtgccgacccccccccccccagcgtgtgcctgtccatgatgctcccctctccaagaactgttgacccagaggatgactaaccacagccaataaagccacatccagcccctgccaggaaaagagaaagaacagtcctatggagatgagttctatcaccagggtgcaggcttggggctgagtgggtgtgtactgaacacagagaccctcgtgtctctcccctcggacatagccttttacttacatctcagtggggcaagctgtcagacccaggcctgccttgtgccgctgctgcattctctctgccatcttggataacaggtctaggatctggaacactctccctttactatccagggatgcagagaaccttgggataaagtgatattcccaagatgcccctgagttagcacttaaagattcccagtgtggagaaaggacggccaggtgtcatcttttacactctgtcaacctggcaatcctggaccacttgactttattggcaggaatgacagttaacctttcccctgacaacagcaagataaaaatgtcatatgggctgggagaggacagttggcaatgtgaccgatgtcaggcaatgcaggcacacaccctgtcatgggtctccacaggtttcctcatgggtaatagtggtgtcaggtagagtaagagacaacacggcaccagggactcatggcttgtttctccactggcctttaccaagccaggccagtggaatgaaaagagtgtgaattctggaacatccatgctcgtcgtgatcctgtggtatggatatttcccatgaaatatcattctcagcctgcagccagatacactcctggctccctgaaaccttcccaaaggaagtactagctaactagcccaaggaagggctctactcaccctccaaatctaactggtttcatttgcatgtaggtttccttattaacatgtcacttctatgaggtgtcagccccaaagtaagtggaatcagggtggtatatttgtgatttaaccagcactggcctcttagctctgtcagagcccctctgtgtccctcacccaccccatgcctgggatcttgtgactatgaaagttccatagttttcacaccaccccctcttgtaccctgtgtccatttgcctgcagggtcttaggcaccttcccacaggccttcatggattccttcctaggaacagtcgctaataccgctccttccactgaaacaacccactctcttcttatcaaccccttcccaccccataggcacttctcaaaaggttttattcatttttaaatttcatttctttcctttgtgtatgtgtgtgcatatctgcacatgtgctcgagagcttgcatacatgcatgagagagtgcgcgcatgcacacacacacacacacacacatgagggtcagaggacaacttgaagggctcagcaccatgtgggtcccaggtattgaacttagcttgccagccttggtgacaaatgtctttacccactgagccatctcatggtctctgcaatgagtttttaaatccatacacaaagaatttttcttctaacatcctggaaggaaaataaaatccatttatgactttttgtctgtaagcactgaatgccagaagataatggatcagtggttggagtatttcaaggacaaaagattataagccatgaattctgggccccgtctgaatgctgtgtgtgaaggcagaagaaaggctcttgcagaatgtacaggagctcagaaatcctagctttctgctctttcttatttgaaaagtagtgtttgtctttgcacactacacaattgatgaatgaaccaaacaacccaggaagggaaagtgtcacagaagaatagtcacgagattcaaaatcagtcagtaatgaaattaaagtatgtgtaattagggaggtatgtaataatttggtaactatccattcaaaaccatggggagggaaggacaagaagggagaaagggggaaaggagggagggaaggaaggaaactaacttggtcctttgatgcagaagacaaaatgtatcaggaaaaggacaaagatgcattagtcacagactaattttaaaatacagttaagaagaaaactttattaatgaaaaagcaaagactttcaaattcacttaaaataatccaagtgcgcagagtttgggttcactgttagctaccaaacacctttgttcaagttccagtctgggagactcaatcttgccttgcctcccacccctgcactctcttctgggagcaaggagctcatgcctgaagttcccggtccttccccagctgtgactccacccccccccccagcacctgccctggagcacctgcccagacaccatttccaagtcctcttatccaaccactacttggcaaaattcagaataccttaagctgagctgatctttctgtattaccaactccctttccagaacaaaacaaaacactacttaaccagtttcatagctcagtgaaagaaacagctgctcatctatttgggaagctcgctggtcccccctctctcctgcaacatccaatgtgcttctaagtctgtccgatgtgtagcccatgcctgtcccaaatccacctttgcttcctctccactgcctctgttccagtcctagatgcagttattgcccagaatcctggaggtttcctaaccagctaccctatattacacccctggaatctatttcccactgggacacggggcttctgggataatgctaatcagacgtgagagtaaatatttatcgagcagctccccagggagaaaagccctgattgagaacagttgcctgtttccatggtgtggactcaattaggcagtttcagttgaccggttcactgacaccagggaacttagagatgagaagatatgtgtgccatggactgcagctcatcactgcaagacattatttctgttttcaagaaatgagcagcgagtggggtggaggaactggggaaacacctcagttgggtaaagtgcctgccaggcaaccatgaagatgtgagtgagtttgatccctagcacaggcaaaaaattgggtatggtggtggacatttgtaaagccagctctggaaagtgcagacgagaggatactctaggtcttcctgtctggtcatcatagcttcatagccacattaacaagcctcaggctaatgacaatgtcctgtctcaaaaaacaggtatgtagattgacctctggtatccatgtacacccacacctacacacacacacacacacacacacacagctggtgctgtaactcagtagccccctttgcttaaaagcattaatgacttcttattccttctagaacaaaggttcaaatccccctgcatgaagctgctaagcccactgatccatccctgctctctgtgattggccaaccagtgggcagtgtgctgcttatcttcctccatcctgacaatcccagtgacttccctgaccctaaactagtcatcagcatcctccttccttagaaaagtcagtccttggttccgccaaactacacgatgccaatcccattatagcctgttgtatactgtgtagtcgttcacaggactaatccgatgcctctgttggagtagcgctgggtctgtgaaattattgattaatgtctgtcttttacagtaccggtttctatgcaggtaagcatcatatttgttttatgaacttcactggcttccctggtgcccgacactggcactgtacaaaattctcaataaatttttgatgaacaggagaacaaaaagacacatacttaaagccaaatggcccaaagggttccaggagggtttaacatttagcaaaaatctattagtcaagaacccaaagaagaaggcaaaagtagcagttttagagacaaagcggaaatcaggtaaattttaaggtaaaaacactaagggagaaaaataaaggaaatcgtttcatggatagataaatgttgtcaattctataaagaaagcacaatggtcctgaaggttttatgtactaaataaaccaacagcagccattactgttttgaacagaaggacacctgagagcatgctcagagcatgagacttgcctagaatctcaccatcaccccctttccctattttcttctaaattttgagatgatagggtcttgataagtttccctagctgcccttgaactcactctgtaggtcaggtagagctttactcaaacaatcctcctgactcagcctccaagggatagagttataggcctgtgccaccaggccctgctaaatagatttttcagggttgggaggagagtgtgggagagaactttaaaaatagtactacaatgtgttccaaatcccaagagaccggtactgctcaaactgtccctgtgactactcactcagggaacagctcagagaccgtgcttcattctacaagtcactgaagacacgggggctttaaagactagtgaaatagataaaaatcataacaggaatctgggtaaatataagtagatacttgggagctttcattcaggagaaggatgctctgataaagcaaacagagggaaggcacgatgcaggagacttgatatattcagaaagatgcaaaacctttactgaatagctcaagagaggtggaaagctggaggggaaaagagccagagtgaggaaaaacacacatgtaagaacgctttcaggggcaggagagatggcgcggcgcttaagaacacttgcttctcttcagaggactcctgtttggttcccagcacccatatcaggtaacacacaacctccggctccagggaatctgatgtcctcttctggcctctgtaggcacccagacatgggcctataggcatattcacacagatgtaaatataaatagcataagtgtttgttaaatagtgaagcttttagcaataaccaaaatggtaaaaatggaagagaataggaataaaaatacagacatagtacacacacacacatgtgtacatacacatgtgtgcacacttgcacatacacacaccctacattatcaataaatactggaaaggtggcattcctcacaatcagaaaaagtgaatttaaatagtggcatcatgtattttagactgtagggtagacagtcctctgttttagtttccctctagtcttatggtttgggttgaacagggtttatgaagtataggcttgcctcagacatagctgaaactggccttaaactcatctcccacctccacctcccaagtgtggggatatcaggtgtgcactatcatgctgggctctggaacatggggtttttaatgaaaaagttcagtttggctgatggtagatggaaatgggaatattcaaatgtagccaatgagaatatcaaacagcaacaactctggccagtcatttgacagtacctatttatcagatctcctttttaaaaaacgcctttgactcagtaattctgctccaggaaatttattgcaggcaagacccacagagatcgcccagagagttatgttcaggggtgtttaccgcagcgttgcctctaatagcacaggtattggaagttgccagatgccaagctgtgataggttgaagaaattatgatgtattctatacaatgagagattatctggccattaaaattttcaacttgtggaaatattcacgaagaagaatattaagtttaaaacaatgatgtaggcccacttctgattccaattttataaaaatacatatgtatgtttacgtaactagaaaagacgaagatgaaatatacttggatgctgagttattctccccggaaaacattccgtttattttctcaccttctcccacagcatccaatccatcaactgggtcttatcaactcgacttccagcacacacacaggatcttgtctactcccctccatccctacgactctgccctagtcacagccactgtcatctttcatcttgacacacgtaaaaggtgctcattggtctccctccctcttccttttgccctattatgattgcatctccatgcaacagccggagtaatccatttccaatggaaatcagatggcattagctcctgcttgaaaccctccagggccttcctatcgggcatccaataaaacacagaacccttctcctgctgaggctggccctcctctctgatcttcctactcccccacttctgctgaattttagcccctctagtctctcctttacaaaacctctttggtcttgtcactagctcgtccctctacctgggatgcacactctgctctttattcagcttgaatgtcacctccccagggtcaacctcagggttgactcctcagggtcaacacccaaagtggccattctctcattagcctttatggtcatctgattttctccttatatattgatacgtctcattgtgtactgtctaaacctgtgtccactaggatgtaaaaatccatctcggctttctgtgtttacctagagctctgtacggcgcactgaatgtttgctgagtgagtgaatcagaaaatggaacaccaaaactgtttcattgaaactggaaagagtaaatcttgacaagcaacttgaccagtaatcttccaacctcagatacggcactctaggaaatctccaggattaaatgggcactctctatggcacatgggtaccctgctgctctctagtgggtaattcctcccaaatgtaacccaccagaccagaaaatgatgttaatgtggacaggcaggtagaatggattgtgtggtgtcctctgcttcagaaacaaataggaccgttaagcctttgcagtctctggggaacctctctaggttttggtgaattccaatgagctctggttttaagtatgcaagatttcaattcatggaaaagaaaacagcttgggttttctttgtgttaccaggaaatttctcttcccttccctgacaggctgaaatagtgtagtggagccaggtgccttttaatgcggtaggaccccacgctccacaaacttagcagatctagactgtaacaacaccatagcaaggctccaaagcagatctgcccccatttgatgtctgtgaacaacttatgtggtatagatccctacaagatgccgattcgtcccatttcaatgggggtacatttgtggcagggcaattcatggcttctatgtaaaaatcaaccatttggttagtgggatgggggcagaaccaatcacccagggtcccatgttccagcggtttacaattgatattggaatataaaatctggaagggacatgtatctgcctattttattctctaattagtcactggtacctaaaacttcaataatcagatgctcaacaatttgctagataagttagtaagtgaattacattgccctccattgagtgagcacttaatatggggcccgtcaatcttcatagtaattcaaattcttaatccttccaccaccatcatgaggaaggtttttcacagaaaattccagcagattagaaccacttttgtatcgtccctctcagccttgcaaatacagagcttagttgggatcagctgtgtggttcttctgcttgggcaccaatgacttcctgagcgaaaatgtcaacattggcagtgttgtgccaagctataaccgggggtcctggccggggcctcacattgtctagcatgtcggcagagtcatctcccagtcaggaccagttgtaccccttcaccacctaacattgtatattcataggctgtctcctcatggtttatttccatcacctctggagtcatagttgtggcctccaccattctccttagtgtgcagtaggttacatggctccatcttcatctgctgcaaacaatgatgctgatgccttagccacttagaattatgacaaacagaagtgagaagggcttcatgggaaagaggagcttcccattggctgctgtggggatgatgtgataatgtcccgtatttgctgcctctgacttggaactttctgctctcaaaggcataccacatctctcctggttctgccaacagttcttctattcacatgtagttcttctctgcccaagactcttacagaaagtttgactattctctacgactctgcaggagtatacttgtgactggaactctcatgtctttatagggcgcccttctccttggatgactgttccctctctaactttgccaagctagagttgtgcacgcatctctatatctaatctctggcgtgtacctcaacaccagataacatgactgattttgttgcctctaatctacctgatggggattcacgttaaaaggtccatcaggaaattgaggaaagaagacacaagcaagcctgatcatcgctttacaaagctccatattacccttttgttctgtagagtaaaacttcacagtaatgagtttgtccagggcagcacacacagtgagccaagacatgcctgaacagctttttccccccaattctcttgcaagttcatgaatatacatctctaaccaaacttgtaagggctctgacttggccattcttctcccaggtcctgctgagatagtactgataaactggagactttatattcgttgtcatggcaacagatatcactgtcctaaggccactccttgaaccctttccttgcaaatgccactttcctattaagtctcactcctaggagatggtgggctgcatgcagacacagcaagaccctacccgcacagggccccaccaactagaacgaggctaggtttcagaagaggatgatggcacacacgggcaagcaggtggaacaaagacaattaactcaattggtttttctgcagttgtttctttttcttttaaagtttgtctctgatgtgaaaaaaatctcactttcaacttacactctacacccaagttgctctctgtctagagatgggaaaattgcttggacaagtcaaaacgcaccttgcatttcccaagtgttttatatgtccagtggctacccagtctttctcaagtagtaattgtgagcatttctttgcagctcacgtttcggaggcccatggtatgcagtgtgagtctgtagccaatgacttgccgttaatcaataatcagagatgtgaaaacaagaatgtgtgaaccctggtgcagacccaattaccctgaagcaggggagaagagactctagcctctacctaagttgcatcttgatgtggactgtgccagtggattctgggaagtggctgagggatggtgacctcatgcaggggatgcatgcctaactcacaggggatgcatgcctaactcacagggatctttccttgttactctggattgattagctggggagtccagctggagagtccagtttgggggaacccaaatgacttaaaagacctgcaagcataagaacctgagtgcccccaattaaggcagattcattgaactccttttcatgaagagaagtgtgaaaatatctgtgtatcccagatagggcaaagaagccattccattcaaactcagtttggtgaaccagtgagtattgggggaccactgtgactaaaaggtagggcatcaccaaagatgttcccaccatgcatgacagaggcctcgagaaaactgcatccctggacttccccatacagattacagttgctgtctccaccatagagcctcactgcccccaaccccctccaccctgtaagttgttcaaagttcatttaaccccaggaagactctccctccctccatgaggaggaggaaatagctgggaaaagcggtcctaattctgaggcagtttctgaagtgtgaatgaatgagcttagaccctggccatctcctctgctccatgcagctgttataacatcgttatcccagagatgctggtcataagcacaggatctggtaccacactgtcctggggcagagtcctcctcatgcctttccccatgcttatacgttgggactcttacaacctaccttgggggagtgttgtgaatataaaatgaggctattcccatggaacacttgtttaagagttcagaccacactttgtctctgtaactcctttcatgggtattttgttccctattctaaggaggaatgaagtatccacccattggtcttccctcttcttgattttcttgtgttttgcaaattgtatcttgggtgttctatgtttctgggctaatatcagtgagtgcatatctaatgacttcttttgtgattgggttacctcactaaggatgatatcctccagatacatccatttgtccaagaatttcataagttcattgtttttaatagctgagtagtactccattatgtaaatgtaccacattttctgtatccattcttctgttgagggacatctatgttctttccagcttctggctattataaataaggctgctatgaacatacccccagagcttgtgtctctagttgcatatgtagcagaagatggcctagtcggccatcacagggaagagaggccccttggtattgcaaactttatatgtcccagtacaggggagtgccagggccaagaagtgggagtgggtgggtaggggagcagggcggagggagggtatagggaactttcaggatagcatttgaaatgtatataaagaaaatatctaataaaaaaataaataaaataaataaataaggctgctatgaaaaaaaaaaaagagttcagaccacactgaaatcatcctcaccttgacgctgggtctcacctgcattcctcctctgcaaggccagagatccctatcaaggtctaagtaggtggctcctcattcttaatagctctgagggggcagcctttccgagtgtaatacaggtacaggccactggtttaatcacaaccagtacccatgtagggcacatgccagaaggaattgtcatgaagttatagtccatgaatgcttaaggcttgtttcttcttaatagtgcatgtagaacccttaaaaacccatctcccccattaagaccaaaaggaaagagttgaaaccctttctgcacataagcctcagtggttcttgtttccaaaattagagctgagacacgaggcagatgattcgaatgatggcattggcatttttgtgcaattggaggggcacagtctgttccctgttagcaagaagatcaaaatgaagtcagagtatcccctacattgtgtaacacttcaggctagccttggccagagacttagctaatcacaggaaaagatccttgaaaatatactgccttcaaaggaatgcccatcaaggggatatgctgagctagggggacctgctctgctaaaagtctggcatggactgcttttgcagagagtagagacgggagcctttgtgggtagctcctctgggtggcagcctctctttcactgtttgatagccagtttctcagggccttggattatgtggctggctgtcacccagctgagcaaaacaccaatgtcacggtgcacaggtctcatgcatgggtatgtccgtggtgggtgcctcactgtgggtggctggagcccatcttcatcattggtatccctcctcactggatccaagtggtgtatacagaatccctggacattccctacctgaccaaaccaggagggtgtcagtaaggggccctgggacaaactgcagaggcacagctcaggcaacgcacatgatgtgtctgctgtggcatacaagtagattacatttcaagggatcaaagttgtgcctcattggtcccactagctaggatctcatatggatatatatggaggttttcagagacctaccgtgggagagcaactgagataaatttaaatccatctactcaagattctttctccaaagggacccactcccaaagtggagtcactcgtgtgttatttatgacctcatgcttttgatttttactcactgttgcgtggccaaagacctgagaagaaacgatttacaggaagaaaggtttgtttagtcatatagtttgaacaaagtccagcatggacagaaggcacggtggcaggggcctggtagctgcgtatttgcatctttgcatccacgaacaggcagaagaggaggtaaggagaggctacaaatctcaaggctcctgcccaaccccctccagtaactcgttttctccaggtagacctcacttcctgaaggctctatggcctctcaaatcctcactaccagccagagtggccaggttttcaaacccttgagccaattgagtgagggtcaatttccatcaaaatcctagcactgtacaagtaagtttgcacttgttttttaggaatgatttcttttcctactcgaggtttcagtaccttggagtaccgctcttcccaacttgctggctttcacctcctatgaaggagaatctgttgccctcagcacagccctggcaccctcaggacagcacgtgctatagggtgggaagaaaactactgccaggcatattggggttgttttcatgtcaggtgaattcagctcaccctgccatcccggcatctgagagaacatagtatcaacaagacaagacatgcagaggtggagatgaagagcaaacctaagctaaagaaagggcttagaggtccttccagtatcttgttaatgcaggaaggacatggctccaagcctggggactttttagtccaagactaaagttcatgtttctagccagggacagctcctccctggcccctcagttaccacttctactgtctccgctctacttcccatcccttccctgacctactctgttaggaagcaaaaagcccatgtcgatcatccctaacccacggtccacctctgcatcctcagctgctaattggctgtggcgctgcatcataaggaacctgagttgttagtgtcatgcctaatgattgctgcctgaacaccagctttaggacatgctccaattacagcacagccaagtccgcaggctgcactgcccacctgcccagagccctcattaggcaggtaacccaagccccaggtttgttgtcaacatggtgtgtagatggtggggagcatgtctcctgccctcatacccatggactccagctctgccttgctcctctgtctgtcctgctactgtgggaaaagactcacagtgatgctagtcaggaaagatgggagctgtttgagaagccaagccagatcagctccctcctttacttatacagaagaggaacagacagaggtcagcagggacagcagtgtcctgtaaggcccttaacggtcagacagaagccttagaagccaccagtcactgcttcccacccgttccgcacaccatttttcctaagagcctcctatgaaccaggagaagccctttgccatgacaccaggctgtgaaggtattgttgagatgatcgtggtcctgagacagtttgagtccatctctctaaagccaccacattccaggaccttgtgtgagtcacaggaaagtactctgttgagtgcaaacagagcccttcgggttgttggctcaacaagtagacagtattttttacatgaagattatttcccttcatccagtccaacctagcccccctgccaaggtgtgtggctaaggggagcagaaaatggatttcattccccactaggcctattgtacaaggcacaaatggctgtagacagcagagcttcattgcttttgagggcaggttctgtctgctgtcttctctgctatggctatgcacggactaagcaccctgggaacccatatattcctagcccatggtaggaaggcaacattcttcaatgaatgaataggttgattcgagttttagagttcagagggtgacccataagggctattgaaagcattgaattgctaaccgtggagttcggatgtcacaggagtcttgggagagccacggggccttaatcacatcccacggaagtctgctgattagatttctgctgaaccaactggagtcacagtcaccccattttcctttatgcctctttgtcatcttaacactggactattgttaatctgggggtgggaaggcttgtgatgtggcttcaaggactcaaaacttggggataacctgtggcttgtgggccagagactagctgccgcactttgtctcagcttgggacagactatccccttagcttaacaatatctctcaggacaagccatgggcttcagccaaagtatatctttaaaagtcatagatttaaaagattatagactaaactgtatataagagaatgattttttaaattgttaacaaatgagcagtctgtcttaaatgtgatatttacatcacctcctccatcttggagcacagaaggatgtaaaagccagaccctgggaaggaatgcggagaaacactctcttctgggcatggcatatgtgatatatcacacccattaactcacagcagtggtggtaacctacacaaggctgagccaggcagcaatccatcctggatggaggaggggcttcatgaggccccaccctctctgcgaagctatagacagttaagggttgctgatgggaggggctcatattgttcagtgatgtagccactggcaagttgcccttcctcagtaacccaccctctcatgcttatgcaaacaaccctaattaaatgcagcttggtggtagcccctcaaaaacaaaggcataaaagtaggaggggacttgggaagaaggggttcagtgggaaatgaaagggaataagaggataatggaggtgctatgatcaaattatatataaatatatgtatatgtgtatataattgtgaaagaataaatgaatttataaaaggcacatacaagatggagataaaaatattatttgcaaaatcacctgtgcaggtattctgcaccaagcagctcttataaaagctaagaataatgaacactgggcagctgtggtcccatagatctctgtctgtagtcacttagactagataatctcaacagcttccaagctggccacaatctgatatagatagtggctttgctatgttcttgtaaggggatatctgtctagttcttcacttacttattttgagaccaggtctcatgtagtccacattggtcttgaactcactttgtagccaaagataccattgatcctttcgcacccactaacaaagtgctgggattatgggtgagcgccatcacaacaaattttacatggtgctagggatcaaactcggggctctatagatgcaaccagttgttccacaccctggttccacagatatacttttactggaatcacctacttagaggggagagaggaaaggtagaaaaacttcctctgtccccactgtgcttcagggaccatagtaggtgttttaaattcatcattacgtgtattctactgtccacaagagaagcatattctctgacttttcacatgccaagctcaagactgttagcccctgtagtggctattcctggttgtcaacttgactatatttggaatgaactacaattcagaattggaaggctcccttatctggaggcttggagatagaagtttctgatgtggatcttggtatggagatcttgaggcatagtggctatggattccagaagattaaatctccgagttcaaggtcatctgggattaaaggtgtggtggaacacacctttaatctgggctacaccttctgctggagacaatataaggacattggaagaagggagtcttgctcttgctccttcccctgcttgccgtgtgagactgagtaactgctagatccttagacttccattcacagctactgctgaccattgttgggaattgggctgcagactgtaagtcatcaataaattcctttactatatagagactacccataagttctgtgactctagagaaccctgactaatacaccccctaagcccagtgctccttctttgacatgatgttcatgagacaagtcagtagcaggagtgttccatagtgaccttagagccagggcccatggtgaccacacaactactgctagcatggctacagccatgctccgattagaaatgaacaatggggacctcagaggccactccatccatcccttcagcatctgagcacccccagcaaggaaagagtgtgggagaagaactgagggaaaccgtagagaactctaacgccctgggtattctaaacactacaattctagcaactactgaaaacacagaccttgtgacagtatgtcgtttccttgtccctagtgggccaagttaaaaaaaaaaaaaaaacctcacctctttgattcccccatctgcagatcagtcccctcaggttgtgtatctctcaagttctccatgaccttcctgaatcattggtgttcccaggagagtgcttccatcatcctgataggcctgcctcatcatctgtcctgacagggtcctgtacatctctagtgccacatgcagcaaagtcactctatgctcttgtgtgcccagactttgaacagttagaaagttcaggcaccgtctgccccctgagctactgctgtgacaggggcaggcctgaggcatcccctgaaatcatggcaacaggtgctccctctgatggcttcacactgaatgccttcttgacacatcttgattccacaggtagacacagccttgcttgtctgccctttgaccctagagcaagtgatgacacctagtgtcaaaccgctaaagcactggaccctaagtatcagtcctgtgattctaggggcgtctgcatgcagtctttgcattgactaaattgtcctgacacatggaccccggccggggcatatacactgagtgagggctaagctgggaggaaattctatcttgggatgaagttctatctttgatccgttcttcctggacattgcaggaagagatcctatgtcctcaatcatgaggcatggggctgagctccttgtgggtaggaatggcctgtgcttctaactgccatttctacttttgccccctgcctgtcactccctcccctgttggcttcaccatgagtcaccctaacatcccacatcaccaaagctcccttcacctgtaccactgctactcccagtacagccattctctaccttccccactgtttccactaccaccatagtttcagcaaacactatctagaagcttccatttgtgggtggcaaggacttggattctcatgtcgctgcagaacagaacagttctcgttccaggagagatggtgatcacgcactccataaggacaaagctctgagaggtcatggcaggagcccaggaggcacacaagaccacaagccgtggttcttcccaggagggaagaagggcagggtccagctcattaaatgctggcacaacagcaccaagtgctgcctggatgcacctggttgcaagtttataatattgtcaacagaggcagtaaaatgctaccatttcacagggctagtctggatggagcgccagttatcagtgctgagcagccaaatgaaggcagtagggtttggggccagtaaacaagtgacttgctaagtcttgcagtaaaatatccaagaccaggttctagcttagcctatcaatatggaaataccaaggggcactttcttcattctgtgtctctctctctgaaccacctcctgttcacttagtcttctgctttccccatcccaccaagaacatcaggcagagaagccagatcaccctgggggcgctccagggcgactccaagaacatgcaggcacaaaagggtaaagagattcagattggccagcttcttttaaattcatccaggcgagctgattacacatcctttgcccatgcagaggaaggactgttaagttttacaactttgcacactagaaaacttgtgcggatgtagcttttgcttgaagttaagctgtcttcttctacgcccactctctaggtgacatcactcagtccccaaactttaaaatcttccttaattgcccctctgttcacattccaggctgaaaaggccagtagctcctgttgtctccacatggacaccatatgggcgtctcacccctagtacagtttgaacagatctcttgctttgtttcgtttttccctcgtgagcctgagaaatatcattctcctggttgttcagctgcaaacctacacaggctcctctcctcacacacccccccatccactctcctgcaagccttgcctctccctcctccccaggtctcagcctgggtcaggctagcagcattagcatctcctgcttcaagcctccgagatgtcctcctcctccttagtctctgccccgcccaggagccacagcacattagtaagaacataaatcgccacgcatcactctcttgctctatcagcttctccctggactcgggatgcagccaacactcattgcacagctccaggaacttcatctcctcttgatcccggaccttgtctcagcctctgtcctctgctgtccttcatgccagcccactctattcctccttcaaaacccaaatctgctcccactcctgggccttgagccatcttcagataatttccagtttgttccctcatctgttatcatcactgctgaaaggctgcctcttcccagagggcctctacgaccacatgaccaagtcttctggttttctattccttggtgacattcatggctttgtgtcagttttttcttctccaacctgtttgcaaaggtgaggggtgggttgtatgtattgttcactaatgtatctccaacatatagagtattctaccacaaaggagcactcaggaggcttataagtgaatgatgaagcctgcagctgattgctcctaactttgtgccccatgcaccttttttcaagatggcatgatggactcatatgctattctcccaagaactgtatttaggaatcatgtctgaacaccatgcaaggtgtgggatgtgactgcacttccttcatagcctacagactttgccatagtcccagtcatgagcatagttagcatgcaggagagagcatttcactaagagaacagatacagataagagttctgtatgccctctctatgtagctgcctgatctgtgatcacataagagaagatgtggctgtgactagtcaagacgagctacataatgtgtgggggccactgtagagtgaaaatgggcttagccccagctagaaatcaatatcatgatactctgacacctgaaccaagcaacagtaaaccccgagccttcccaaatgtgccatgatcctgtcagcctgggcaaggacagccaccctctcacccttctctaagatgcttgtggcatggatctgagcacaagtcactcgtagctccgcccatgcatcgtcaaggcaacagcagaatgtatcccctctcccccgcataatattccccagcatagtttatcactgcccagggcagagagtggaaaaagagacaaataggaactgttgcccacccagggtacttctcagaatgaaagcaatggagccaagatggggaagaaagaaagtggtctgagttaggactgctcatgaggcaagacttccaagccttggcatgctccccattgccctggctgacttattctacagtacaaaatcaaacggaattgctaagaggttcaagataaccttcaggcacaaagctttgaacccagagctcttttgagtgtagggggcctgaattatggtactaggcacacaaccataagctgactgtggcttgaagcccagaacacgggacagccagcgttgccctaggagcctctctggtccttagaattgcctcagaaatagctcaagcaatgctcaccaacactggctcctgccaccagggtgatgtcgtttcttaaaataggacagatcacccaggcataccaccagcctgggcgcccagagaaaagcagagctcctgccaggcacccatgcaggcgagagacttagattgctaattaggatctgtaagggcgagaaaaggcttcttaaacttctgttagagataattaatcttgtgtttgattgaggcatagtctacagacaacaacacacatacacctccactaacgatttcaaaggcctgacactaccgtgccagtcttcactctgtctcaatggatctcaacgttcctaatgctgtgaccctctaatacagttgctcatgttgtggtcaccccaaccatgaaattattctcgttgttacttcttaactgtcattttgctcccattatgacctgtaatgtaaacatctgccatgtaggatatcagacatgtgacccttgtgaaagggttgtttgacactgtctcccacaggctgagagccattgctcaagagcattgtttcctggataaatttttgccattccatccttttgcagagcaagcatagtgttggttctcaataccccagatacttgaacttcatacaagtgggactgtattttacagtgagaagtgtttttgcatctggcttgctctacttaacaatcttgtacatttttctattaggtagttttctttactgtgactgaatacatgagaaaaagggaaagaggaaaggtttgtctggcccatggcttcaggggttcagtccatggttgctcagcccatgttccaggtagagcctcacagcaatgggagtgtctgaagggagctattcatgttaggacaggcaggagctgagaacattttagtgagtatcattttgaaggtatggcctgttgtttctcttggaatggatgtacagacaagcacataaatagcttctcgggaccattagccattaggagctgcagtttaaatccacagtgacagagcatcatacactcactgagctggttaaaattgaagaccagtgacagaaagtgttggcggaggtggggggaacagagcgtttgtgacaggaacatgagatgctgcagctacgtcagagaatggttggatggtttgtctttaaatataagaggtggctcagtttccagcacccatccccactgggagactcacaacgacctgtatgtaactccagttctaggggacctgctgccttcttctggtctccaaggacacccaaattcatgtgcacataccccatatccctcccacacacatacacatgatttaaaattgattcagccactctactcccaagtgtttatttactcaagataaattaatacgcaggtccatgcaaatactagtacataaatattcatagcagctttatttgcataggttttaagactgtctcatgtagccagggctagccttcaacttgctagttgagttgtctaccctaaacttctaaatcttctgacttcacctctggaattcggaagttacagttgtgcaccaccacacccaggttatgcagtgctaaggatcgcactcagtgtttgggacatgcaatacaagtactccatcaactgagctacatcctgaccttgatttaaacctcttgaagcaacccaaatattcattgatagttgaatgaataaactacatcaatatcatagaatatatatgatactacttgtagtatagaatacaaattattccccctatgaagtttgatgaacctaaaaaaatctttttaaaagatttatttgtgtgtgtgtgtgtgtgtgtgtgtgtgtgtgtgtgtgtgtgtgtgtgtgtgttgcccatggagattggaagaagacataaaatctcactgatggttgtgagctacctaatgtgggtaccgagaaccaaattcaggtcttctggaagagcagcaaacatagccactaagcaatctctccaggcccaggagtggaatcttttgatttatactgcaacatgaatgaatctcacagtaattatactggatgacagacgacaaaagtatctatcacatgattccattcaagtatagaaatcccaaactaatgtctgtggacagaaaatctatcagtcatgggttggggagttgggggaagagggttgcaaaaggccacaaggaaacttgataagcatgtttcttaccttgaaatgtattcagatttatttatttttactttatgaatatggattctttgcctgcatgtatgcctatgcaccatgtgtgtgcctggtgcctgaggaagtcaaacaaggatactgaatatcctagaactggagttgaagatggttgtgagctgccaggtaggtgctgggaaccaaatcagggtttctgccagagcagccagtgctcttaactgctaagctgtctttctagttccttacccttgattaattttattattcgtgtgtgtgtgtgtgtgtgtgtgtgtgtgtgtgtgtgtgtgtgtgtatacgcacatgggcatgcacataggtccatagaatacttgtggaggtcagaggacatctttccagagtctgataacttccaccaccatgcaggtcctgggacttgaactcacatcattaggcttgatggcaagcaacttccccagtgagccatctcattgccctcttaaccttgattttgatgtggtttcatggctgtacacaaatttaattttatacacattatgtagatgagattcagttacacttcaggaaagttggcctttgagagttgaccacacagtatggatgatcattgacacgtcactgatctttattgtagcttcatagtacttcccaagtcacattgatattaattctccaatctgctctttttcaagttttgaatatattctagatgaatcttataaacagttgcctttcatttgtcagacttcattcccaccacacacaccccaccccatgtatagaaagtctggtggtatcacagttgggcttgaaccgaaccatagatcaatctagaagtattgatgtcttaaatctattgagcctgataatccatgatcagattggccagttttgtgagttgtgcttttattgatttttccataaaatgtataatatatactgatcttccatgactatgatgtgtctctagtaacagtttgtatttactcccgaggtgggtgtttgtataccaagccccaccactgccagtcttgtgaggagaagttctgatttttccctattttttttttctgatttgattatatcctttcttacttttattttctctttggctctcttttgataatcttcctgctttttcttcctccttgaggtagaagcttccttccttccttttcctttggctgtttctatgtctgttggctaacagactgttgtatagtttgagacaaggtctccttgtctttaatttctgggttacaggtatgcacccctacatctggcttccaatgggaagtaaaacatcgcccgtattgttgctgcactggtggtaacagcttgtttccctggtgctatgtttttccttgtctccttttttagttagtttctggtgatttagttagtttctgccttctacctcagtgtgttcttcctatttatttgccacagggtgtcctggcctacgatattgtttgctgtttttgatcagctttgaagacttttaaccaaagtccctgaatacccttactctgccccattatctctctgttcctctggggatccatggcgggggagggaggtgttcagcactccaccctccctcaccattttcttggcatttgtttattctgtcttttttcccccctctgtactttgctctggacattttttaatcttgacccatctttgaatttattaagccttttctctcctatgaccaatcagctcttactactaccaaagaccatttaaatctttaattcagatcatagattccatatgcttcaattcaaggcgtgttcttgtctggattttacctcacctaggcatgtattcctttcttattatcataggattctagtttgtttgatatttccttgttgtgaaagtagaaacagtaggtctgagtgtttgtatagctggctggagaggagacgtctgggctggaatggtgtgtagccagtgataaggcacgcattctccttacacaacctagtgtgagactgttgggtcaacccacacagacaagaggaaagcagaaaacggagaggctgaaaggtccagtagaggaggatggagaaaagagaagacgaatccagccaaattcatcctatacatacatgaaaacctttcatgatgaaacacattgtgttagccacttttcttactgcttgaaaaaaaatgcttgaaatacttgggaaaaaagcagcctaagaaaggcagcatctatttgggctcataattccagggcccactccaccatggtgagaaagtcttggtgccgggagcctgaggcagcaggtcacattgtacgtgagaggtcaggaaacagagagagatggatgctggagctcagctcacaatcccctttatgttcaggctgtggtttgccaccacccatgtgagtcttcccacctctgcttcctaatctggaaactcctcatagtcacgcccagggacttgtctccaagatgattctagagcctgtcaagttgaccaccaatcttaactgctgcacttatcattgtgcattataagatgcatcaaaagttttcaaagagtggaaacaatattttgtaaacatccatgttctagctaaaagtcgaaattggtccctaaaacttggatgccttgtgtttttagggttactggaaagttactagggaagtataaagaattctcatggattctttaccccaagaccctactcaagttttgcacactgtcctaatatgtcatttatagaaagagaattcacagcagagcacttgctgcccttagcggccacctgtcctgagagttatttacttaaatccacagctgttctaggccttccctggtgaccagggctttgcatgttttaaggtagcaggcagtcatgtcaataatgtcctttgattagagtttatcagatgtttcctcacaagcacattatagttgtggattgaacagaaacagtgtagatattatgatgtggatttttttccctaagtcccatctagttgcctatgatgccaccttggcccatatatcctaactagcttaaactgtctatgtgactcagtctagaattatctgagaaagggagtctttagacatgcctgtatggcatttcttgattactaatctatgtaagagggtccagtccactgtaggtggccccattccctgtacaggtggtcctgggatgtataagaaagccagataagtatagatctgtgagcaagacagctggtaagcagcatcccccatggttcctgctgtacctctttggctatgacaggagttccttcgtcaggggtgacgtatttggaacagcaagcaggcctgctctcagggtcctgattgagcccctgccctgacttccctcagtgatgggtcaataaactgaaataaacctttcctcccctaagctgctttaggtcagaatattttatcacagatatatgaatcatcatagaataccaggttgtgtcatctttggccatttgagtaaggtgatgactgccagctttgtccactatgacatttccctttcctttaaattacaggtatgctgtgctgaagcactttgggactcctcaagtccaaatatgtctctttccttgactgactttaacatgtgcagctgtgtcttgtctgaattagtagtgtggtgactaccaactagaagatctctgactccaccccttgttctccattcccagttagaattccactgtgaatgtttctttctggtttgctcgttcactttaaaaaaaaaatccctgtgaattcaccaaatttatgaacttaaagcacttccctgttactgtcattatttattttcatgctaaaaatgtacgagagttggccagtaggcagtccttcatcctccttcagtgtccctgacacacaatactctttaagtgcttgcttattttctttcacaagatgttccaggctattcccgttctttgcctgcccctcccagcaacaagccatgtttctcaaagaactttggttcctttacgtggtaagttgtattgacacatcgagacgtgggcgttaagtgtgtttccggctgcttctgagatccttccagaacaacagcatacatgggttggtgcacattgacaagtggcagtgtcacccatgtgtattatgccttgtaaagcacgggtttatttcagcgcctctgtgtgtgacagtcccaactgtcattctctatgtccatgtgattgtattgagaggtgcctaggtaattaataaagcagacccccggggtgtctgtgataccatttccaagtggtaaaacttaaaggacctctgcggaaggtatggccttgttggaggaagtagaccactaagggtgtgtcctcggggggttgtatcctgccctggacacttcctgtcactgctctgcttgacttcctgtctgtcgtgatgtgaaatgttgcatcccacactcaccactatgataattgaaacctctgaaccttggagttaactaaacccattcctcactttaggtttcgaagagactcttcctccttttaagttgtttgcatcaggcagtctgtcacagccttgaagacctactaacaacccccagggccagctcacccacagaactccttctgagatttcccagctaactctctcctagctcccgttgttcataatacttgtgttaattacttggttcccctgccccttggttctctcctaaccaccaagctgaaccccacttgttggctacaactcctcccaagctgccctgctagaaaggagcaagtacccctccatttggtcatttccttgtggtgaccacgactccccctgttggccaccaccatgacctgatacctttctctttattatgatttttaaaaaaagattaataccttttatactactatgtacattataaattagggataattttgagttactatgacacacttagaaagactttgactttccatgttatctagttgtgctacataaacatgactgagcccatgtgtgctgcagaaagattctgtctaagctttgtgtgtagccacgtcaagagggtgaagctcctccgaggccgagtgctgctaggtcagagccatgaggaataagcccatcctggtgagcacagacctgcaatcaggcgactctatagcctagaaaccacactgctgagcttgcctgacccactcagaaagtgcctcggctctttagtctttgatcttttccctgcttcaaatatgattcagaaatggtcagccactgtcctgtaattgtcatcagccacactggtgttcgtttccttgaacattcctaatgcacttctctttcttgctaagtttctggtgatgggagagtttaggtttgctttcagtgcacgggtgggtccagactcacacaggctatctggcagggccacagccttttccagcagcaggacccactgcagccactctctgtgttgggcacaacaccctgcatttccctcagtaattactctgggtcagattctatttttaaaagtcctagtctgggttctgcctctggcagtgaggcagataaatattctttgaatcctttaaagcagtggtgtgttgacaagagaaaagtcactggagaatgaaacagcaactgaggtgtgcagagagaagcccctgcagttaagaacactggctgctcttgtggaggacccaggttccattcccagcatccacatggcatcctgtaactcctgctccagagaatctgatgctgtcttccagcttccactgacaccagaatacatataatgtacgtgtgtacatacatacatacaagcaaatagacacataaaattaaaatgaataatcttatcaatagcagcagaaagcacatgaaaccaggagtggagagaagctgtatgcctgacttcactccaagggtttggccacactcagtgagattaactccagtttgtgaaaagcctccatgactcaaaggggagacccatcagccctccaaggtggacctatttagaaaatacacacacacacacacacacacacacacacacacacacacacactataaacctggggccctaaagggccaaggagaagtagggaatctccattcctccaaggaactgcagggaattaaacatgtttaaaatcgtgacaccaagaagagaaatagaaacccctgataacttatagccataagatctggtttggttttttaaatctcaatcatgaattgaagtttaatccaggatgctggggttctttggtacctggcacaatcaacatcaaagccagacctcaaacacattcatagggtaatatccaggagatgggaacagttttttaaggtatctgtttacttctgtgtgtatacttctgtgtgggttcgtgcacatgaatgcagcactgtgtgggtgaacaggagatggcagagcgagtgccaggtagtcctgagccacctgccacaggtgctggggatggagctcaggtcctttgctggtggccttcactgctgatgcacctccgcagcccaatgcaatggtttttgttttgttcttgtttttgctttattgaaatgcaagaaggagtgatcccaggagagagccagcatgatatttaagtagcaaactataaagcatatatatttaatatttttaaatagaacatacaattttaaaaaaatcaagagctaagtagccaaatgtctttgtaaagaataaagtagttttggaaataaatttcaaaattgaaaatttcaactcttcttgttgttcaggattgtttccgcttcctgattttgtgagtgagtgagtgtgtgcgtacgtgcgtgcgtgcgtgtgtgtgtgtgtgtgtgtgtgtgtgtgtgtgtgtgtgtgtgtgtgttttcacatgaaatttaagattttttttccaatttctttgaggaattgcattggaagtttgatgaggattgctttgactctgtgaaatgcctttgttagaatgggtattttcacagtatttaccctgacaacccacgagcgcggaggcctttccactcccgattcttcttcaatttcccttttcggtgtctttaagttttcagtgtacacatctttcactttcatggctacatttattccaggatgatttttgaggctattgtgaatgaaattgtttccctgctcccttctctgtgtgcttgttgtctgtgaatagggtttttgtgtttacatttgtatcattggtggagtctttaggaagataatgtgctcttgacttcttcctctcctgtttttgtcccttttgtctccttcacttgtcttaatgttctagctaagactttaagcactatactgaacaagagggcggagaacaggcatcattgtcctgttcctacttttagggaaaatactttgaatttttctaattagaatgatgttggctgtgggcttgctgtttgttgtttttatgttgagataggtcccatgttattcttagattctcctaaacttttatcaggaaggcatgttggattttctcaagggcctattctgcatctactaatatgatcatgtagtttctgtctttgtctatttatgcggtttatttggaggcgggggtcaagacacggtttctctgtgtatccctggctgtcctggaactcactttgtagaccaggctggcctcgaactcagaaatctgcctgcctctgcctcctgagtgctggggctaaaggcgtgatttatatatgttgagccatccctgcatctctgcgataaaaccaaattgatattggtgagtaatctttttgatgtgttcttgagttatctgtacaagtattttattgagaatgtttacatctatgttattagagatattcgcctataatttttttgttgggtttttgtccagtttaggtaccagactgatatcagcttcataaacaggatttgaaagtaacccctcattttctattttgtgtaataattttaggaatattgatgttagtttttctttgaaagtctggtagaattatacactgaatttgtctggacctggacttgtttgattgttttatttaaatttgggagattttttttagttgctgctttatctcaatgaatgacatgggtctatttaaattgtttatttcatcttggtttagctttgctaggctacatatgcttttaaaattctttcatttcttccagtttggtgaaatacagatttttttttttttttaaagactgtccatgtgaattgtttggtttccacagtgtctgttgtaatagctcccatttatttcaaatgttactcatttgggtctcctccccttgtgaggcaagatctttcttctgtagctcctggactaggtagactatgtagattaggctggcctcaaactcccagagatccacctggctctgcctctcaagtgctgggattaaaggcgtgcgccaccacgcccggctcccccttatcttttttttttttttttttagtttaattttgctaaaaatgtgtcaatgttattcatctttccaaagaaccaactcttcttcccattgatgtctatgtgtttaagtttctttacttctattccattaattgtattcattcttttaatgaccttatgatcattaaatataataacccccatctactgtttggggctgtatttgcttttgttttctcaaggcctccagggtcatcattaaccgatcgatttgaggtctctagaatttttggaaaaatacactcaatgctataagcttcctcttacgaatgccttctttgtgtccataaattttgatatgttacaggttcattttcattcaatctagaaattttatttatttattttatttatttatttttttggtttttcgagacaaggtttctctgtgtagccctggctgtcctggaactcactttgtagaccaggctggcctcgaactcagaaatccgcctgcctctgactcccaagtgctgggattaaaggcatgcaccaccacgcccggctcaatctagaaattttaaacctctttcttgatttcatccttggccattgctatcatctttgaccaattatcattcagtagtaatagacaagttaacatgatttagtacttatgagtttgtgtactttcggtagtttctatcgtcattgctatccagcattatctacttagttgattgagaactaggagaagattcgtaatggctaaagagggaattcatgttctggaagatagatttgaggaaagtatgcagaatatagcacagaaaaactgaaagtaaaaaatgtgaaaaaattatttaatagaatgagaacctgaaacatatatgatgaatcagaatacttatgaaagaaaagaaaagaaaagaaaaaggaggggggagagaaagtggagggggtggtggatgggtgagaattcttaaggatttataaaagacataattgctcattttcaagaaacctaaagaagtgcaggccgactaaacccaaacatttattgtttccctttttgaattagccctcttacatttattctttttaacttttgttatatagtctcagtcattaggcaggaaaataccagggtgtgatttgcactcttctccattttttccaaattgacttcagtggcaatcagtagatcatcaagcttcagggtcctacaaccaaaaaaaaacccctcagaatgggcattgtcattagcatagcattagcatagctcagaagttaacaaaaaatcctttaaacaaagtgagtccttaatcaagactactcttgattcttataagtgattgattaaacagaaaaatcagtgctttcatgtaaatattttacatctcaaaatcaactgaatttctactaatttctcttgcctctgtaactgcacattcctcagagataacatatgatcttttttatttttattatttaaaacaatttttatatttaaatataactttatcatattcttcccaaggccttccagatcctctcctcatcccatacccaactttaagtcctttctcaaaaaacaaatataaacccaaaacaacaacaaatcctcacaaaaccaagaaaacaaagtagaacatcctcccccgcaaataacacaccaaaatgtaaccaaataaaagactcaaagcttgtggaagcaaccagccaataactaatttgatttaagacccactccacaagatggaacccatacctaacactgctcaggtggcccagaacttgagactagatggcccagggacctaagataaaaccaaacaacactgatctcaatatatatatagttatcaaatgactcccagtgatattctgtgacactcatagatcagtgcctttcgcagccattgtcagagaagcgttctcctgcagcagataggaacatgtatagagacccacagtcagacattctgtagagagtgagagaccttggaacactgccctaaatgggatgtctcctaaatctcttccctcagagttacagaaccccttaggagagcaggtgagaaaaatgtaagggccagagggggtggaggacaccaaggaagcaagtccctctagatggacgtgagcaaagccacatggactcacagaggcagtggcggcatgcacagggcctgacaggtcctcaccaggtcctctgtgcttatggcttctagtttcagtattttttataggctttctgagtgtgcgcacaagcgagcctctgattcatatgtcttctcttggtttcccttcttaaaggccatttaaatcttcatttcagattatatattctattcaagttagttaaaataaatgtttaaagtgataaaggggggttagatgaatagctcaggggtagagtgttgcctggcactgaccctgtaatcctccaacccaatatataaataaagtggacattttagacaaatgcagctaagaggatttgaagcatgataatgtattgtaataaatatagaagtgatgtatgtgacaaccatcaactatttaagtcaagaaaagtggcgagagttcattcattctgtgtgtctcatatggagagtaaaatactaattaactttagactttcagctaattacgctttgtaaatgaaccttgtaaaccaaagaataaagaaagtatattttgggctggtttggtggctcagcatttaaggatgctttctgctctcgcagaggtcccaggtttagtggccagcatccaccctgtggttcatacctgcaactccagctctagggaacctaatgccccttctagcctctgtgggcaccgaaagcgtgtggtgcactccctacaggccaaacactgacacatgtgaaataaagctatttttttaaaaaatttctatttaatttttaaatgtggaaagggagaaatttgtgaaagatactacccctaaaaataaagaaatgagagaaagaagagcagagaaaaatgcaatgaacaaaacagtgtagactattgcatgatggtaggtggttcagtgggtagtgtgaggggaaataaatggattgatatgaaaagatgtggctcaaacctatggtatcaagggaactagatctcggacaagtgtgcatggttcacatacataaaataaaaatataggaaataaacaatttattgcatagaaaattgaaggttgggggacagggagatggctcagtgggcaagagcattgcttagcaagcatgaggacctgagttcctatcccagcacccacataaaaagttcaaccttgctgtgcatgcctgtaaccccagtgctggagagacccggacaggaggatcctaagtgcttgctaggcagccagcaaccctagtcaaagcgatggcctttccgtgcagtgaaagctcctgactcaagggaataaggtggatagaggaagtccccaggcaaaacccaaaacaaaatgaaactagccttaaactggatggaagagcacagtacttagatgtctattgggtcccacggtggacacagcaatgacctagcacacacaatgcctcagtctccatccccaacaaatgataattagcttcgggttattgagttaaaaaattatttattgtctagtattcatgtccactcatcatttaataagaatagttgaagaatgtacagttccttgaacctgatttcctgggatggtgtcggtgtgtcccgtgttattttcttgcaggtgggcagccagctgagccaatgccatttatgaagcagtatcttttcacccatcagaatggacacgtgggccataggattttcatatacactgagattaatttccggatcttctcttttattttgtgctcactgttttgcctactcctgcctcaacatcatgctgctctcgctctctctgtcagcgactttctgctccgatcttctaacacctgcctatgcaaccccctccctggtctctccttatctttcctggttatctgagggcatttactctttcaaatgaacttttaaagaccactttatactatttcaaaaggattatattaaatgtataaatttatgggaccatcttcctactgaaagaataagaaatgactttgcatttgttcaaatcttattttatgaccttcaataagattttatagtccttttcacataggtcctatggctttcctgtcaaatttattcataaatattttatgggttttgccattattttgagagaactatttcccctttttgtgcctaattatttattgataatgtacagtaaaatggttaattttgacacatttatcatctgtccatctacttcatcatggctgttttataatataattttatcctttttttttccagtactgggcattaacctggagccttgtacatgcttagcaggcaggcaagcgtacgatcactgaaaggcattcccagcctcctttacatcctctcaattatgagacaaagtctccatacattacccaggctgcccctgacttcctctgtaacccaggctgcccctgactccctctgtaacccaggttgctcctggctccctctgtaacccactgtaacccaggtttccctggactccctctgtaacccaggctacccttgatctgtcactcttcccaccacagcttcccacaccagctaggattacagactacacaaccaggcctggctaatttcagtatttcccaccactctcttgggcctgtaagtatatataatcagcagccggtagtaactgttcattgccttccttttttaaacattaaggttaattcatttttctatcttagctatttcgtttttcaataatgatggtgataatgacgatgcctgtctgactcccaattttaactggaaactctctgattgtctacttacagggacatatttaaagggcttttttctactcctttttacttaacaatttcactttgaaggactgtttttttaatgtgtgtgtgtgtgtgtgtgtgtgtgtgtgtgttggcttcatgtaagtgcactatgtgtgtgcagtatacaaggagaccagaagagggcaccagatccctagagctggagttagggacacctgtgagccactatgtgggagctgggaacagaaccagggtcctctcaagagcagccagtgccttttaaggctgggccatccctgaagcacctggagctgatgtattttttcagatttcctttacttcccttttgttctgggtcattctagatatagtctctacttgatgttggaagccattaatttgagtctcaatagtaataattctcttcctaaaattatctgattatactctttggttaaaatacccattttaagaaaaccttagattttcttggaatttgagttttttttatgtcattgtttgagttagccttctggaagcttctccttcctcctcgctctagaggcaagacctcctgtcatatacagttattctccatgcctgatctctggggtgaagttcagaccttaatgcaatgcagcacctggtagatgatcactgatggtgtgagcctattgtgaagacagagtgtttgctggtccctgtggaggcagtaaagaagctatgtccccatgggctcttcggctttgtgaggagcagacccagcaagtcactcagctcacctgccagaagtttcatctccactgaccctagtgtcaagttccccttctgtcattgtgataaaacagcctgacaagcagggaagaaagggcttgttcacgcttacaattctgggtcatagtccatcatttgggggaagtcgacataggttggcaagtcctatcacatccacgtccaagagcagagagcaatgagcatatgtgtgtggggctcagttttctctgctgttctgcagtccagggcctaagccaggaagtggtggcaacagctgttagccttgatctccccacatcaatgcagtgcaagtcaagggaagtgggatcgtccccacaaacatgctcacaagccagcctgagctgggtaagccctcgacgagaccctcttcccagatgaattctgggaggtgtcaggctgacaattaacactcgccatcgtgcctagaatctaatactattactaatctttgtcatgttacccaatgttatccaataaacatttttatggccgattgtcccactgagataaaaggaagggtatctgaggagagactgccaccctaactgtaaaatagtcttttgtataagagctaatattcaacttttgtgattaactatttatttaggtgtatgggtgacttgctagcatatatgtctgggcaccatgtgtgtgagtagcagaggccagaaaaggacactggatctcctgggactgtagttaatagacaattatgagccgtcctgtggatcctggagaacagatcctatgggaaagaagccagtactcttaaccactgagccatctatcctgcatcaagttaatcttttcttttccccttgaaaagtataatcaagactgaaaccatgcatctctctttttttttttttttcttctcttgccaatgttaaagttaccctgaaacagagaatttgtctcacaggtcaagcatataggccatcagggcagggcaacatgagatggaggcagctggtcacattgtgtggccaaccaggaagcagagagctaaatacttgcactcagcttgctttctcctttttagagagtctagggaatggcgccaccttttttgggcaggtcttcccacctcaatttacctaaccaactcaatcctctacaggcgtgcctaaatgctactttaagctagacagaccctcacaggtgtgcccagaggcttgcctcttaagggattctagatcttgtcacaccatgttatcatcttgatgcatccatgacaagtgatctaatcaagacaaagagctgacctggaggcagaggctcgtgcacaggggctctaggagttagcatcctttcaggctggttaaatctccagagagaaagtggcaggagacatttcagtccctccaactgggtgcaccacagtaattcctgaaataattggaggcagccagaggagtagtgccccttaatcattagtggagaaactggaacaaacccacgtactggggcatggatcagccgctgcagattcacggaaaccagcaacatctggtgccatcagctcagagctggagggacctcagaggagccagagaacgtgacaagggacctcagtacctaggggaacagaacctaagacagagggcgactggcggggctttctgcagaggaaagaacttgaggagaggagtttatttggatgacgcactctaaaataaagccattttgtgatctctctccctctcctcccctctctctccctctcctcccctctctctccctctcctcccctctctctccctctcctcccctctctctccctctaccctctttctacgtctaccctgtctctccctctaccatgtctctgcgtctacagatgatgtcggtatacagagaactcagcagtggaagaacaacgaaacaagtaagagagataggagagaagaggaggaaagagagaagagggagaagaaagaggagagaaaaaggatcaaagaagcacagaagcggaaagaagacggaaggaagggaaaagaaacaagaaaaggggataagaagaaagaaagaggaaaaagaagaggaagggaagagaaagggaacacgacgacagaagaaaagagacagagaaaggagaacaacagcaggacaggaagaaaagaagaagaaaaagaacagtgtggtgcttccctagctctccgctccctctctcttctnnnnnnnnnnnnnnnnnnnnactacgccatcagagcagacgtctacagacagacaaccaacgcggatgggcatgccgccaagagggggacggccgcaaaggggcatcaggcccccacttacaccagcccacggggtcgcgcccggaccgggtcgagggcaaaggagacgactcggcggcggcgccgcgctcccgtccgccgaagcaggagggcgggccccagggcggccgacgccgacgcgagggggaagccatgcagccggcaaggacgcatctcgggtggatgaaccgcagggaacccccagtcagccacacgacagcgcccgaagggacggacagtgccgagcgcgcaggccggcaggacgactgtagaggatccgcgtcttgtccctctcccctctgtcccctctcccctctctccccctctcccccacgccccaaggtcaagagcgaaagaagctcgcttttgtgctccacatttttatgctgctttcatccgcaagaaggttttggaaataacccctcctaagctggttcagaccacctgactgagcaaacagaaggaggagtaagatgacttcccttcatagtctatgtagccggaagacctctaagttaaacactgtctcggaggtatgtcctccgttacagatgggggatgtttattttcagtcccagtgtatctgtctctgctcctttccttccctgtgagccgcgccttcacctaccagccttgggcctctgcacatattgtcagatttacctcttcttttttaaattgaatattttctttatttacacttcaaatgtttttctctttccaggtcttcccttcagaaaccccctatcccatctcccttcccctgcctctatgaaggtgctcccccacccacctacccacccacccacgcctgccctcccaccctggcattcccctgtactggggcatcaagcacccttatgcccaagggcctctcctcccactgatgtccagcaaggccatcctcggccgcatatgtggctggagccatgggtccctccatgtgtactctttggttggtggtctagtacccgggagttccagggggtcagacctgttgacagtgttgctcccccatggggctgcaaagcccctcagctccttcagttccttctccaactccttcatctgggaccccatgctcattccaatggttggctgcaagcatctgcctctgtatttgtcaggctctgacagagcctctcaggagacagccatatcaggttcctgtcagcaagcacttccaggcatccacaatagcgtccaggtttggtgactgtatatgggatgaatccccaggtggggcagtttctggatggcctttccatcagtctctgctctacactttgtcttcatatttcctcctgtgagtattttgttctcccttttaagaagcactgaagcatccgcactttagtcttccttcttttggggcttcatatggtctgtgaattgaatcttgggtatcccgaacttttgggctaatatccacttatcagtgagtgcataccatgtatattcttttgtgactgttctttccttacctcactccggatgatattttcaagttccatccatttgcctgtgaatctcataaagtcattgtttttaatagctgagtagtattccattgtgtaaatgtaccacattttctgtatcctccccagcatctgctgtcacctgagtttttaatcttagccattctgattggtgtgaggtggaatctcagggttgtttcgatttgcatttccctaatgactaaggatgttgaacatttctttaggtgcttctcagtcattggagtttcctcagttgagatttccctgtttagctatgttccccatttttttttaaatagggttatttagtctaacttcttgagttctttgtatatattggatattagccctctatcagggaaggattggtaaagatactctgaggtagtgtctgtctttgacactgaggtatgtttcctgtatgcagcaaaatgctgggtcctgtttatgtatccagtctgttagtctatgtctttttattggggaattgagtccattgatgttaagagatgttaaggaatagtgattgttgcttcctgttatttttgatgttatttttatctttgtgtagctatcttcttttgggtttgttgaaagattactttcttgctttttctagggtgtagtttccctccttgtgttggtgttttccatttattatcctttgtagggatggatttgtggaaaagatattgtgtaaatttggttttgtcatggaatgtcttgattttcccatctatggtaattgagaattttgctggatatagtagcctgggctggcatttgtattctcttagggtctgtatgacatctgcccaggttcttctagctttcatagtctctggtgagaagtctggtgtaattctgataggtctgcctttatatgttacttgaccttttccccttactgcttttaatattctttctttgttttgtgcacttggtgttttgattattatgtgacgggaggaatttcttttctggtccattctatttggtgttctgtaggcttcttgtatgttcatgggcatctctttctttaggttagggaagttttattctacaatattgttgaggatatttactggccctttgagttgggaatcttcattcttttctataagtattatccttcagtttgatcttctcatggtagtgtggatttcctggatgttttgggctaggagctttttgcattttgcattttctttgactgttgtgtcaatgttttctatggtatttctgcccctgagattctctcttctatctcttgtattctgttggtgatgcttgcatctatgattcctgatctctttcctaggttttctatctccagggttatctccctttgtgatttctttattgtttccatttccatttttagatcctggatggttttgttcaattccttcacctatttgattgtgttttcctgtaatcctttaagggagttttgtgtttcctcttctacttgtttacctgtgttctcctgtatttccttaaaggagttatttatgtcctccttaaagttctctatcattttcatgagatgtgattttaaaatcagagtcttgtttttctgtcgtgttggagtatccagggctccctgaggtgggagaactgagttccgatgatgccaagtaaccttggtttctgttgcttatgttcttgcccttgcctcttgccatctgcttatctcttgtgtttgctggtcttgctgtctctgactgtggcttgtccctcttgcaagcctgtgtgtcagtactcctgggagaccagttctttcctggaggtatttgggtatggagagctatggcacagggtcagctccaggttgcagacagaaactggaagggtcctgtccccagctgttccttggttcctatgtcgtaatggctctgggcaggtgcttcttggaccaggaattggagcagaagtggttggtggtcttacctatgctcacaggtgtgtcagcactcctgggagaccagctctctcctggtggtattttggtatggagagctgtggcacagggtcagctccagggagcagacaaaaacaaaagaaccctgtcctggactgctccttggttcctgtgtcctaagggctctgggtggtccctcaaagcagaagtcatggtcttacaagcttgtctgtactctgagagaccagctctctcccagcggtattcgggtatggagcaagcgctgtggcacaggagcagctctgggcgcagatggaaacccaaagaccatcagatttatctttacctggcttttttgttttttgttttttgtttttcagctgactctgccagaccctatacctagttttgaatatttgaggattggagcctgggcctacctgacactacaaagacctcatgatgggccttggcactctgtagatcccagctggctgcctcgggccctgctctagggcctgctgttggggtacacagattccccagttttatgttaaagagcccagaagaaacctaggacagaacccaggagctcctttaatgcttggggaaagttctagaaatcgtgaagacagagttttcattgtcctcccacactgcagaggggaagaagccatctgttacaatcattaaaaagggtgaggaaggaggatataagtttcaaactgactgcacagtgggcctgtgtagatgcagatctgaggaagagacgtagagaatttggctaccctgcccaaggcactgggttccatctccagcaccatgcaactaattaactaaaataaacaatagggatgattagtttttaagtgatggggggtccagaatgtctcagtcagtcagtgccttcctggaaaacaggagacctgagtttgatcctcagaacccacgttcaaaagccaggcaggatgaggaagtggacagaggcaaatcccttggtatattccaagattggtaagagaccctatctcaaaaaaggtgaaccgaaccagaacatgagccaaggttgtcctgtggccacaacccacacacatgggacacgcactcactcaaactcacacgtaggcatgcacacatgcacacacgcatgtacccatgctcccacgccgatgccctggacctacaaggctgccttggatagtgagttgcaagaacctgatgagacccacagagcttgccctccaatcaatcaactccagttcctttgtcctgacagcttgtgatttcagcctcacccagtttgaaagctggatagagttgccatgctcccaccaaatcctggggtaactgcaggggaagtgctctgtggggatcaggcaagctgttttcagtctgccttctcagcccagtcaatacttgcactataaccgtgttcacttcccttaaggccggcctcccgaagccagtcatcagtgactgcaccatgcccatgggttcttgagtctgacaagtcctggggctccctcatttccagctgtttgttcttcctattgttgactcagacagccccatctctgctgcataccaatctcctctggtggataatctcactcagccctctcagcatctcctaaggaccagagagatgctgtttatagttttaaataagagagacaggcgcttgtcttgggtcacatggctactaccaagcacctaggagcataggcctggtaaataaaggttcaagtgtgtggttgcttgagggtagctgagggaactcttaagtcccgagacaagttttggcacggctcagtgatattgtacatccatggtgcctgggcctctggctctgccccagccccagccccagccccatccatagtacctctccaaagagcaatttctctaaagccaagcttagtgattggagccccacggccctcctccttttctggagtctcattgtgaggttgagactagcactcagtttgggaaggatgagagccctggcccggctccccgtgaataagacaaggcctcatagtgtcaccctggtgccctgtttaataggccgacataagccaaagccctgacctaagtgagaggtctctgttcagctcaacgcttaccattcctcaacagcctggactatgaggttacgtgcgaacttaaacatttactccagtgatgatacaagtaattcatcccagtgagaaaggtaacctagaggtcccgatgtcctcagcctgtgtaggtcatgcactggcagtaagccttgcccagctacctcgtttctgcccacaggaccagtctcttcctggtgaataagatgtgaccacagctgaggagatggctcagtagggaaaatgcttgccatgcaagcctggggacctgagttcatccatgtgcaaagccaggtgcactggcacatatgtgaaccaggaggatccgggactgacggactgaaccaggatagtctaattatcaatacccccccagccccagtgaaagagaccctgtcttaaaggggctgggggtggggactggggctggagagatggtgcagcagttaaaagcagtcaccgctcttaggaagagcctgggtttggttcccaacacccacatcggtagttcagacttgcttgtaacttgaattccagggaatccaatgccctctagcctttactggcatctgcatgtacatggtgtgtataacttatgcaagtgttcatgcactcgcataaataaaaatatttaagaacttcttttaaaacaaaatattaaaaggaatgacacctataatccctgagattgacctctggcttccacttatgaatttgcatactcgtgcatacacgtgcatgtgcacatatgtacacacacacacacacacacacacacacacacacaaccaatgcataaatgatcgagcattcacccagccacccatagggatcatgtactctcatggacttctctgccagcagaagctggaggccgctgttgtgccaggctagggtttgtagcagatggcagacaagattctggaggttctgggtgctgtgtgtgctcctctatcttctgtatccaactcactcactcctttgggctcagcagtgagtggtttcctcagagcatctctgtgacccacagggtgtatgtgaattttaggatctcatcctggggtcttttgtataagcactgatggcggtcaggaggcaggtggttctctctgagcgatggaacagccacttccaagacaagtggagggaaaggcggggccaccatctgtaccaagcaggagaagaattctagacacagagacacaacactgaggaaaacacatcagccaggagtccacatcccgggtggaaacatgagtggctctcccctcatcctagactgtttcctcttgcattaatagaataccgtaggctgggtagattataaacaaaagaaatctgtgtggtcttgtttcaggaagctgaaagaaatccaagagcatggtctctgcactgcttcatgataggacagacaggaaggcaggagagggcagaggacatgctgagatgagttgaccaggaacctacctgggtgaccatctcactactatggtggcactcacgcaattgtgactgtcatggttgatcttctctgtcaccttgactgggtttagaatcccttctgtaaggatgtttccagaaaggtttaggtaaggaggaaagacctacactgaatatgacactgtcctaggggctggggcctcagactagatgagagtgagctgaggaccagcatctgtcagtctgcttcctgagtgtggatgcagtgtgaccagctgcctcacattcctgctgctgtgatggactgtgccatcaaactgtgggccaaagaaaagctttccttctgtgagctgctttgtcagatagttgctacagcagtatgaagccagtcagtgccctagccacctctgaaagactcttcagctctgtcacaatcatagcgcatgccagcatgactcttgaaggcaacgttcaactgtagcttttccatgtgtcaccctggacgccatctctgagatgggaacactcatcttgctgaggaccaaggagccagagtttggaagcaaaataacccactgagttctcaagtgtactgtgctacgaggaagccacactcactgttacaggtgcaatcctggaactcacccaccttgaacagcctctggtggggctcaggctagtactgagtcacacctcatacaggcaagctcagagcttctggccaccaggtctgtaacactgatctagagtcctctctgaatgacagcagagggtcttcagcaccaactagtacaatagatttgtggctccaccaccatcccttaatgtatcagttcccacgtctacccatgttcggtaaatttaattagtgttgaaaagcagcttatttggcaagatgatcagtttttaacctgggtaaacgacttcctttatgactataaattaggcatgtgcgatctttttcacgcatcacggttgtcctcataaacactggaggcagttgctgggagtctcactccgttacctttcccattactgttttatcatcgtcccggtaggagtggggaagtcattctgctttaatgacaggaaagatgtggcgatgaggggctggtttaatgaggaaaacctcatggtcagcgtctccatccatgcctgtgtctgcctaggcaagctccgccccccccatgggggcctgctgtccgcagccttggtgagggacatgcttggggctttaaagctccttttgtcttaattgcgaataattaggaatcaaatatttgccatagttgatttccgcagcagagagagaaggtgagcagtctcgttgtcgtccatggccaccggctggcacaggtgttttcttaaccgtgacctcctcagagccgccagctcttacacgcacacacgccccaagcccctgcccacaggctacgctacagctgcgcgacgccacttcctagccactgcgggcttttgcaacaaacggcccttggggcgcgccccaaccccgccccaaacgcgcccctcgccgcctcgcacccgcccttaacacctcaccccacgcccccgccttgcggaccccctctctcacgcacgcacacgaaaccgggccacgcgctgggcacggacggcaggccctctagcaacttctagctcctgcctcctctagcggctctcctctgactgaacgaaggaacctccagcgaatatgtgtctctccgtgtcccagccatgcttcagaccctttcacccccttcctgacccacttgagagaggcaggcaaagatggactcccaaacgatcactacatggaacccccgtcaccctccccgtgccagcctctgacctggcattggaacatcggcattaagttgtccttaaaattgttgtgttccttaaaacctgagtgttctgtggccaccgaagaacagtggtccgtccagcccctgtggagccccctaaagctggagccagggtaccagatctagggaaggagctcaggctgactctaagaaggtccctccagggtaaatcaaacctgataggcaccgggagagaacagagaggtcacagctcgagaagccgcagcacagctgagtctgagaagccagagacttgagctgtttgttttctaaatgagcctgctttcagctctgttttgctggcacagagaagtttatagaaacagtatctagtggtaaggcttcacttccttgccctatcttgggaaagaaacaaaagctgattgtttcagcgctgtgttagtttcttctcgtagctgccagcactttccagagtggcccatttcccaacaacccaggagaatgctgctaatcaaacacacttggtagcaaagcaaccagaagccctaggcaccgaggatgggggagatgggatgggcttggaggaggttgagggggctggggggggaggggggttccagcccagagctcctctgctaagagcctgctctctgcacccctcccttcccggaactcctcagcctccacagaaaagctgctggggtaggagggtggctttggagtggagggagcctttgcagtgatgtggggacagtcagccaagtggataaaggagatttttcacaccccgctctggttttgcccttttatgctgcagagatatgttgaccttcgagtttattatgatgcaagaaaaaaagtcgatatttcttaacttgccaaggttaggggaatttaaatgagttattgaattaagtagttaatcttcccataactgatttttccccctttcatatctatgttgatgaaaagcagacttaaaccaaaataggaaaagaaggattcttgttttttcccttaaacatatttgtcctagggagaagaacctgggcctgaaggctcaatgttgacagccagacccattttgtcttgcatagcatatgggagacggtttggttggttggttggttggttggttggttagttggtcagtcttacttgcttttttgtttggttttagttctggttttggcacatgttatgtagtccaggctagtctcaaacttagtatgtaaccaaggctagccttggacttctcatcctcttgcatcgacctcccagatgttgaggttacagtgtgtactgccatagcaagcatggaagacaattgcattacaacatatcacaaacattcccgtagctgcaaatgctgtatccacgttgtaactatttgaacttttagttcttaaaaaaaaaaaaaaaatcccagcatgccatatgttgtcattaatggcaccaggcatcccatagttcctggactcctctcctacagtagaatattagttttatgctctgggtggacttctctcttaccagtgatataaaccatcccccagccgcctgcctctgggtctaagctctgagcacctctgtccaaagttccttgtgagtgtgtgtaatatacaggggacatactcaagcaatatgacaactgccagttccaggctcaggcttctatctacagataaaggtcatgctatagaggactggtcagggatggatggaggatgctggtggccctgttgatggtctccccaccccctccttactatacatccccttagactctgcaggaacttcccacagtagacatagcactccttaattcttctgtttagctctctcaatttcctgcaactatactattgtctgacattggagtgaaaagtacttcttaggctcccatagctccttcctgacctggctgtcttaattacttttaaactgctgtgtaaggcaccatggccaaagagacccattgaagagtttgttgggggcttacagttcagagggtgagtccatgaccatcatggcggaaaacatgacatcaggcaggcaggtatggcactggagcagtagctgggctcacatctgatccacaagctcaaggcagagagaggggcagagttcgtttggaatggcatgagcccaccccgcagtgatacacctccttcaataaagccacacccccaatccttcccaaacagttccaccacttgcagactaagcattgaaatacatgagcctatgggggctgccctcatttaagccaccacactggccttatttatatcatggctttgtcacttccatcttcaaccagaatgaacaggtcagagagaagcagagttgcatcttcttgatccttggagcctgtcagaggacctagtgcacagctggctgcaagtcatcacttaaagaaaatgatgggtgtggtggcccatacatgcagtgccagcacttgggagatggagacaggaagatcaagaatttatagcaagtctgatttgtatgagatactgtctcaaaagaaagaaaaacaaaaggaaagggaataagaggaaaaaggaagaaagtgaagacagaggaagggatgggagaagaaaccagttttatgatgcttttgatgcagttctagtctgtggagtggtctcaaggcatagggacagtcctctggtcttaggcacctcttagtgagcacaggactaggtgttttcatttatcccattgagagcaaggggaagtaagcccatgaaagcacaagtgttccccaagggccctcctacaggttcagggaggcactggtctgatgctgtgtctgagatgttcagagtgaatctcataaaaacagtaactctgcatagcaagacaacccttttgattcctataactactacttggaggaacggggactccatgtacccagaggcccacactccaccttgggtcacctcagcctcacaagaagttaaggcctgtgtgcttctactgttcctgacctaaaagagcaacataggctgtttgtacctctgttctccagccctgagctaaccctctgtgtttatatgcctctacaggtcttcccagccctgggctgtcagcctcctgtgggaagaaactctgcagccatgggagcaggtgcttgctcaataggacgacagggcagccctcgtgccagtgtctggaggtgtgcaggccccgctacatgcctgtgtgtggctccgacgggaggctctacgggaaccactgtgagcttcgccgtgcagcctgcctgctgggcaagcgaattgtcagtgtacacagcaaggactgctttctcaaaggtaggaagaggcccccttgcctgtgcttcagcgttctgtgatgagtcttctgatactcttgtgaccagtgacaacggtgctgggtgcacaggtcttgggtagagaggcagtaaagggaagagttggtacattaagccaagagcagcagggacctttcagtgatatacattaagtctaaatcctactccagagatttccacccttgcccacccttagaatagaatctagggaggccaaaccaaacccttaacagatacaggctctattaggcaccaggtaataaggtacaacccaagtctccacacagtgtgtgtccttgcaaagtggcaacagagaccacatgcatccctcggaaaagagttccatgagtcaggaagttacactgtgcatttaaaatgaccagatgatgctaagcagagtggtccccagccagtgggagagcatccctcgctttgccttttcaaagaagctctgaacaaagtcagcgaagacagtagaacacaccagtggaggcagagaccaaaggactcactacgcatggaggttaggtgggaagaaaggggctagaccataagagctgcagggaggggttctgttttatgtattaatgttttctcagcacccagcacagtacagcacaaagatgctcagaggctcacagatgcacgtggatataaaggctagaggctaggggctgttccctatgtgaatgtggcctcggtgaggagtatgtgccgtgccctgtagagatgcttgtgagcatgagtaaaacagccgtgagtgccttaagtttcctgtgctatagaaacaggacatggcagctggacagaccaaactgagctagaggatgctggaggtggaagggctgcctcggatccagccatgtctgggatctgctttggatatagtaaggaagggaggagagagatgtgtgtgtgtttgaagtgctggccacctagggcttctgagctgctctgtagtgacaagctgggccttacaggctccctgtgacgtgcacatgtgccaaagagtgcaagcctgggttggaattgtcatcccaatctaagtggaaacacccaggtatgtgagcctccaccccctctgctgtgagccaccagcaccctggtgacaaagaggctgttctggattagccatggtggcgtgggctctgggaaggtgcacttgagcctgtgacactttcatcaccgtggtcatgacgctaatgttcaggtgcttcaaaatcatgaggtgcattatgcaaatgagacaacaaggagctgaggacggatgcctggaagcgctgcccagctcgagcccgccacttccccggcaacggagcgcactaaaacacttgaccagttgctccagctttattggccgtgttgaattttatagactgatgttccattctctggtttccaatatcccccaaattgcatctttctgaaggttttttatttcctcatcggagtgtgcagagcctcccctgacatcggttattcaaacagcatttctcatttcacacgaggggaagaacaacggccacaaaacctgccgcagtgagggatgacgagggcagtctcgagctgggctccgtgttgattgaatttatgcactgaatcttccaaatgcagtgtatcaccagttctgtgaacctcccccctcttcctacccccaatgcagagctgttcccctccagatcccctgacagtgagcaatgtcaccacaagtcccaaaataccaggttacgtctgggctctggtatgtgtcagctgtgtggccctgggtgcctctctgtatgtctctgttctctccttcagctgtaacatgggcttggtggccaccactgcttgttctggctgtgaaaataagggagatacacagagatcatgaggcatgactcctggcccactctactgatataaactgtcattgctgcttctcagctaatatggccacaggcttagagcacagagatgcccaacctgaagggcacagaagtaggtacagaggctttgcctaggggcctcctggggacctctcagagcccagatagcctagtggcaaatagagacggctataggagattgtgtgtaccaagccctgatgctttcacacagtgtctactcagaaccaggacttcttctctacccctgatccatacatctgcacttcttggaaatccttttaacacctatggctaggagtgagcctggcatggcaggcaggagggcacagtctcctaggattcctctagagttctcagctctgggtcatgacctcttggggcggaggtcaaatgaccatttcacaggggtcacctaagaccattggaaaacacagatatttatattgcagttcataacagtagcaaaatttacagttatgacgtagcatcaaaaataattttatggttgaggtcactacaatctgaggaactgtattaaagggccacagcagaggaagcttaagaatcattgctctaggctgtatcctggagggactcaggcactgattaacagggactcatgggggtagatggcacatcagccctaagcaaggaacttcccccagagtcttggctccaataggaagctaatggcagaggctggttaggactgagaagagaggggtgaaggaccacattgtctgctgtccctacctcgccatggcagcaatctgtttaataccagcctaagatccacaggtgaccatcagtcattcattacaaatttccacaaagctattaacatgggaaacttgaaaacacttttgcccacgaaaacacaatttctagagaacccatgaaagaacactccaccctgtaggagtttatctggcccagaagccaccaatacatggtctctcatatggggccagagtgtgtggatcaagaggaagagctgtgacagattacactggatcacggcactgtgtctagagcccctacggggaaggcttctgcccagcgcagactggggacacacagccctcgccacacgataagagagaagagtcagacttctaagccccctgctcataaggaaacttctgctatcaatcagccttggttgctatggtgacagaattctttgtgactgctaaataaaatacagtatcatttaggagtcattggcctcctgtgtgaaaaatcagactaaatccaaactctggctggcttctattcaagtttgcagctctaaccccagcctcctgggccagaagctgagcatctcctgttcaaagttaggagcatggagaaatctgggaaagactttttgggggatgcgtttttttttttccgcaactccaaataccaccaaggtcatacagccagacgctggatgggactcgctgcccggcttcagacagagcttgcgtttgaaggcgtcttgtcacagtgtgttcttccatgcacagtagcttccgctttaaaaggttctttttctgacttggttttgaagtcacgctccctctcccacaaacttgctctctgtgcaatccctcaacaaactagggttgagttatacggctgatatgatagcatatttgggcgggtttccaaacaaaccatgaaatcatggaagcaaaatgggtggctagagcctgcctgtcctcagcctcctcagcctgtagaacatttacagatgttctttagatcgcccaggatcctgcacgcttccaggctagtgacagccaagaaaataatctacatttacattttttaaaaaatgtgtagaccacacattcactgggcttttcgatccttcaaatattaatgttctagaagtgtgtgtgtgtgtgtgtgtgtgtgtgtgtgtgtgtgtgtgtgtgtgtgtgtatctgtgtatctgtgtctgtgggctagaggccagatgatggtttcagatctatggaactagaattataggcacttgtgatcctatatggcatggacactgaaaactgaatgtccatcctctgcaagagcagcaagtgctcttcactgctgagccatctccctagcaccctagctttctgtttttccttgagtgttggtagacagtcgtgggaactcagctccttgtctacgtgttaggaaagtaaatcttgctgccagagaacttctttctcgctcgctctctctctccctttcttctcatctcactgttgttatcattatatcgttgttgttgttgttgttgttattgttgttattgctgctgagctacttgcatcttggtgccttcagaacttaggctccacaccttcccagggccatctctatacttttataaatctcatctgcctttccaagggaagttactctcatcacaagagactttagtcagcaggatggacgtgtgagatcttgctgcagagctgtgggagaatggggcgtggtgtaactctaccagaggagcagcttccgtagcttgaaagtcctttaacaaggaaagactgaggcccaaggaagtaaagggaggcccaggctttcggggccaagtgtgttgctatgcctcccggagtaggccactgaggctggcctcatctgtaaagtgggtataatagcagatgttccttcatgccatgggttgttgtgagaatgaaatgagtggaatcgagggcctctggatggtggcgatgttattgcagacagtaagacactctcaaggagcaaggccgacaggctgtaaagtccattcccaattacagggccatgagtcttgagcatcagcttggctgcattgagagatgccaggggaattggtaaagtgcttctctcagtatgtctgtgaaggcattctactgattgtatcaggagctagacacagcggtgcaagctcatcacccagcactgaggtgatgagggcaggctgaggcagaaacgtcacaaattcaaggtgaacctgagccacgtggtggggggaagagagacagagacagaagcagagagacagagagacagagagaggcagagacagacagagacagacagagactagaatggaattgtgggggtttaggggttctgacattaatgccttcatctatgaaacagtagcattttttgaggtgtaacagaaggagaagagccaggtcatggggtgtatccttcagaacttgctttttcctatagtctcattctcagctttccagcaaacatgaggtaaagcaccttccacaccacactcccccactaccacggcatcctaatgcataagtaatgcataagtatgactatggcctgagtctcctagagacatgagccaaagtcaaccgtttgtccttttcagttgccctcttaagctctcatggtcacagctgtacaaggatgcaaaggctacactggatatggcccgaaggaaaggggtggtagctcttccttcaagctagaggagacaagatgggtcctacctgtttctttaggaagtgactggagtttgatctcctccaaatggctccttctgtgaagagcgctgagtctcccaggttccctagctggttagcaagaagcaagaaaccctgctagccagcaagaaagcaattcccggagtgcacagaagggtttggaaacgtgttggtagaacccaagaaggccttcaattgtcagaagatgtgaaggagtgagaagctccataagtgtgcttggcagaggaggccctaggaggcgggtctcgaaaagacagaggggatgccaggtagaaaccatggggaaggtttcgaggggcacagaaaagatcaaatgtctaaaatttggatcacagagggaaagtggagttcagaaaagggccaaacagagcagggtgaactcaaaatgatgctgtactagggagagggggtgaccattggaacaaagtccagcttcagtccctagcatccattcaatctcagcctacagcctctctcaccagacaccaagacctccaggatatgtaggcattggtgagcaatctttaatgtggaggactcctcccactccgtagatctgaccagcatcaatgtatataattagagactggctgaactgaaaatttacctacaccctagcacaaacacataccccactacagtctccccagggtgcatttttttccacttgtagaatctgcttccagagtagaaaaaaaggaaaatgacttcaaacaaacgtgtacgttctttgactatttccccttgggtttcagcaagtaatgtcttggtctgagtcccctgaaaatgcgcaagaacactatcagttcagcacgtgtggcgtgctccacagaacagctgcatcctgaatgaattaattacaacccagtaattaaaaattgctaataagttattgagctgagaaagtctcgcactgcattgatttcatgcacagaaacaagcttcggtctctgaacctcccacctccgccattgttccccgctgtcttcagcacctcttctgcttgtttctacaccccaccctgcttctctctaacttcctcggtgtgtctgccattggcaggctcactttctaatcctagagtcaaaggaaaagactttgcttcagaatcccttcatgtaagcttcctccatccccgtctacctcagccattgaattacgtaagctcacctacacagggccatggggatgactcagtgttgaagggctcttgtggcacaaccatggggacctgagttcaggttccagcaccaacataacaggctggggatgctatcaaggtcccctggaaccccagagctgttggggcctgatgatcactggatcttgttgacaacgagcctactcaatagacttgccctaaagaagtaaggtagagagagatggaggggggcagttacccaacactctccactggcctctgtacttgtgttcacacacatatagcagagggggggtagatagatgattggtagatatgacatgatacatgatgtgatttgatatggtatgatatgctatggtatgatatggcatgttatggtatgatatggtatggtatggtgtaacacatgacatgatatgacatgggatggtataatatggtatggtgtggtgtaattgatatgatatgatatgatatgatatgatatgatatgatatgatatgatgatatgattcctgcaggaccagggctttcctgtgtgaacttcaagctggctagcatgctgggagaagttctatgaagcaccagaccccctccatgaaaagttcttattcgtgcctagccccctttcatgctgaaggtcctgacaaatgtaggtgtctgctttatttttctccgcctacctggttagagatattctactaagtttttggctgaatccacacattagtgagtctgcaacatacagtcccttggagtgaccgaacaggaaccccttaaaaggcctcagcaaagactacacagatccgtgaggaggagcctgctcaaaggctgtgcaggttctctgggacaggaggatgttattatgccttgggtctggaaggccccaaataggctcatggtttacagctttgtgcctcagttgctttgaggacaaaggcttaaggaggaattgttaaaaggtgggactcagctagaggtgggtcactagggacagagctggaagagtatacccagcccctggatcctgtcctgctcttgattcctcttctgccataatgtgatcaacccccatcatacattcccgttgctgtgaacttcatcatgtctcccctccagtgatagactggacacacacacacacacacacacacacacacacacacacagaaccacattgatgagccaagacaaatctttccccctataagtcctataagttcatcttataaaatgttctgtcacaacaaacagatcttttttaaggcatttttaatagatattttcttcatttatatttcaaatgctattcccaaagccccctatgcctccccccctccactgccctgctccccagcccacccactcctgcttcctggccctggcattcccctgtactggggcatatgatcttcgcaataccaagggcctctcctcccattgatggccaactaggccattctctgctacatatgcaactagaaacacagctctggggggtactggttagttcatattgttgttccacctatagggttgcagacccctttagctccttgggtactttctctagctccttcattaggggctctgtgttccatccaatagatgactgtgagcatccacttctgtatttgacaggcattggcatagcctcacaagagagagctatgccagggtcctgtcagcaaaatcttgctggcatatgcaatggtgtctgggtttgatggttgtatataggatggatccccaggtggagcagtctctggatggtctttccttccatctcagctccgaactttgtctctgtaactccttccatgggtgttttgttcaaacagaacttttagagggctaccaaaacattgaggggaagaggaggaaggaggggagcaatgaagggacagacaggcagacagatatggagcccctacttacaaccagccctccaggaggctgcttgggggaagactgtggaaagagaagtggccgtagctctggcagctcaggcctttcagagatggagctggtgctgaaagctggagtgagcttccagatgatcactccaagtcaaatgtcaaatgtcaaattactagagcaagaagttgttgatttgggacttccttgaggctccccctactgtgccttcaattaagatcaaggcccctgtgtagcagccactaaatgacaccgcatacccaatctctgtggtcgagcagtttatctaattatgtgtgtgacaaactcagcagctgtcagaccagccacagcacaaatgtgttgactctgtatgcctgcccccaccacagagcgtgtctgctttcttgggccacagggtagaacttcctcaccctcctatagatgggcatcactttaggtcttctgcttcctggagtcttgaggagccagagggcccttggtgtgggacagaaagttgagcaagaagcctgacggccagactgctcctgatacctggttctttgtgcccttacctccagtctccagggtgagataagtgtccgacccttctgcctacttttcagctcaggaaagcaatgtttaggccatctttccttctctaagagaaaaggatccttgtaactgaaataaataagcttcatgcagcggcccaaggaagcacagcaggggacaatcaacagagtccctgctggagcaagctctgctgcaataaccacaccccagggaataaccaaatatggagtctgcaacccagaccgctccctaccaacccagagctgaggtggggccacccaagtcaatggatctattgtggttcactgtcaggcaaaaaacttgtgttcgatcctcttccaaattccaggtgccgcgggagagccaggtccaggacagagaagtttctgaggtggaaagggaaggccgctttccggcatctgctggtggtaggcatcacttgtcctcagagccctgccctctgctcttctttacctgctccattctgctccaatgaatcctctccacttactaacagaggcaatcggagtggaaatggctttcaaaagacctcgtgctaaacgaaggaggcaaaaatcacttgatttgcaggtaattaaaacagccagacgcagtgaactctggccacatccctttgtaagcaggtatctctgagctgtgtgtttctctgtgtagctaggaaggagggctcctccagggacctgtcagtcatctatctctctttagctgtcttcctagggaagcttccatttcctcttctacctcttgtactcagtctaccaccacttcttaagatagctaagatgaggtccaaacatctggtcctcagtggcccagcagacacttctggggtgtggatcagtacctccctccctcaactcaccctgccttactgagctagcactcaccggctcacattatctctgtctccttcttccttccctcacttcatagccttctccttcctctcatacatccatgtttccatctgtctttcagatgttgcgtagttcactccaattcagtgacaaggtctgtatttcctttgatgtgtaataaacccaaggtctttgttgagagcactggcatagatcttgaagtctatgtagatctgctaactccatctgataacgtggtgaagctcacacagacccaagtttctttggttccccgtagcttttccataagaaaccccagaagctaagctgtgatgtcctgatggcagaaacttccccgatagatagatgcaggtcaaaaaggaggggccaaggaagaggtatcttacaaggtcacaaaaggaaaaatacttctatcaaagatgtctcgaagagaacacagggtaggggtgaagaaagtaccaggaagggccaaggacccatcatccttttcatgcagatagtgggcttgttggttttcctttctgtccatgcagagggcatttcatttgttctgtcttggtaccaatagtaaccatcaccatcatcaccatcaccatcatcaccatcatcaccatcctcatcatcaccatccctacagacttacctgcaggcaaatctgatggaagcaattcctccgttgaggctctttcatccccgactctagtttgtgtcaagttgacaaaaacctaatctgcacaagagtaaaaggaaattgtgcttcagcggcatggttcagaagacccctcacttaagcccagggaagagcaagcatgtttggggggaattaccccaagaaacaaaagcacattttagacaacagctggattctgctgtcgcctcaagtaaacacgaactcggagaagagatgagagataggattaccacttggtctagcgattgtcaaaatcagtggaagcaggagaggggaagggaaagatctgaagaagtggaactccaggaacagacgttccttatacatggaagctgaaaggagccaggtcagccacggggagggaagggaatgcatattcccatgttggagaatatggagaaatattcttcccaaagagaatagattaagcctctccctaaatataatacgtagaaaacgagaaagagtcaaattgaggaacagtgtaggagaggatggtagccatggagaatagacacagaagggttaacacattggtggctaactgccacagagcccagcgcaaaccacagggacacagcaagagagactggagaagacatctggttctgtgtcccaggctcttggtggccctagtgggcctccttgccaaaggccaacattaacaacattgtgtccataaaaagcgcctgcggggttctaagtgctgagattctagtctaagagttctgcactcaacagatggtggtcatgtgtggaaatggcattagtggatgttcacatggaagaagtttctgagagtgccacacctgcatggtcctgcctggggccagggaacagaagcaggaaccgcaacaatttggatacaacccagagaatgtgtgtgtgtgtgtgtgtgtgtgtgtgagagagagagagagagagagagagagacagacagacagacagacagacagacagacacagacagagagagagagccacagagacagacagagacagacagagacagacagacagagagaggaggtgtgcaaacaatatggatgcagtacctgtggaggccagaagagggtgttgaatcccccggagctggagttatatggatctgggagcccctctgtgtagatgctgaaaaccaaacctacgtcatctgcaagagcagcaagtgctcttaactgcggaactatttctctacccacccacaccccagagaatctgacaaatagaaagccgcggtactcaagacttaaggggagcatatagctgccaaatatgagaagctgtctaaataattattccaaatacaattaaccaaaagttcaaagggaaaagtatgaagccaagtgtacttagtacccctcactctgtgccggttggtgttttgccagcttgagaacaagctagggtcatctgaaacaaaggaccctcaactgagaaaatgcctccatccgattggcctggaggcaaactttgaggtgttttctttattaatggatgatgtaggacagctcaacccactgtgagtggttccagggcagtgaggttctataagaaagtagactgagcaagccatggggaacaagccagtaagaagtactcctgcatggcctctgcatcagttcatgccttcaggttcctgctttttgagttcctgccctgacttccctttgtggtgaaccataagctgccagatacaatgaaccctttcctccccaacctgcttttgggtttatcatagcaatagggtacaaacgaaggcacttgcttgtgggaacttcaacagattatacacaatatttttagacaaggtcttgctatgtaacccaggctgtcctcactttactctttctgatttagcctcttaagtgctgaggtaacttgtgtgggccaccagactaggacagatcatacacacattcttcttgggtaagaaagctaagtggtctacataagtccaaggaaacaagtttccatttcctttgtcccagtaacccagaatgaacctagtgttggctgtaaacaagcatcacttgttatccccagttgcatccaggaagccctgccttcttgctgatgtgtccaggcagctcaggtaggtttaacctctgtctggaagttttctccacaaagatgagcctcccccccccccaccattcatcctggatgttccctaggaaacatgctgaggttgagagtaacatggaagaaaacttttctgacccacagccttgtctggcaatttgattagatttagaatcacctaggagacacacctctgggtgtctgtctgcaggggttcctacagatgttcaactgggcaaagaagacctgtcttggatgtgagcagcatccacgtataaggtcctaaaccaaataaaagaaggagaaagaaaagacaagctgaacaccagcccctaccccttttttctccctgcgctccctgccctccctgcccctgccctccctccctgccctgccctgccctgccctccctccgtcctgaggatacaatgatgctgcacagctccctctactgtgacatctcatcaaactatgaaccataacaagcccttccttcctcactgtattttgtcataaagagaaaaaaacatggggttgccgtgcatcttccttagcccacaatgtgtaataagcatacgacacaatgtctatgagtaatgagttggtatttagtaatggccgtaaagtttcacatgaaccgacgtggttgatctctgagagaaagtgtgagagctgtgctttcaagctttggggaaggaagggagccaaagaattgcactgttcagaggtgcaagtggaagttaagccttcaggacagtggaaaccaacatgggataaaaccatatgcaaaactagcaaaggccactgcagcaagtgacactacgctgtccaccattcacgggtgagtgccaggctctcagtctctcactagcagatggtttctgggcatcatctcaggacctcctcccgtccattagcatctgactgagaggccaagggagctcaggctgtgaccagttctgtttctgagctggcagatgactgcagttctgggctgtcatctctcctctgtgcatcacacaggagagaggatctgacctgtacctcgggagacacctaggataagtgaccagggtggtggcaaggggagaccccttggacagctcggatgagcaactctggtgttcctcttccacaagccaaacacttgtggcttgtcagacatgaacctaaatacagtcatccctgagagggacgggaaagaagacgtgtgggcttccacaggcattaagcattgccgtattcagtcttgataatgaaactaatcatattcgttctctgacccaaagtggctgtctccatgtgactgtgtggtatgagcacattgcagagtaaagggtctccaccaatgccaagcaagatgaggagagggtgggcaggtcttgcccccacaggaaggcgggcacccacccatatttctcaggggcaactctctgtctcttcctgttttggtctctctcctccacagtggcctccacacccctgctggattttaatggcaagaaggacttgtttgtgtgccaggcctgtctccataaacacctcctgccaattgtaaagacacaaactttgcattttaaaaagtcgtgaggccctctgggcaaatagctgtggttctataaaagacctcaggacaacgggatcgatagaaaagacaagccaaggccacccctggccaacatggattccctgcagtgccagccaaagacataatgcacagaacagttggtgggaagcagggacctgtcgggtgaccatgccatccagagcgctgggaaggatatctagaagatgaggtcccaccaggcttcttggggggcagtctataagggattctctgactctgattacaatcacccaaacttttagcaaatgttttttgttttgttttgttttttaatttttacatttgtcccttttataagaaactagagcttgggcgggaatggagggcagggttcacagctaacgtcacaagccaggtctagtggtgagcaattcacttccttcatttcgtttactcttgaggatgagggcttccattgtgcctacttggcagatggagacactataggccctctggctggggtgcttccatgtcgtgccctctgctgcctcagagggtctcagtctcatgtgactccttacccactgccacccagaacctggatggggtattggctctgatcattgcacccccaaccccatcttggacctgccctccagcacgaaggcatccacaggagagtagagaagcagtgtgggatcccaggcatccccagcaggcctgactggtgctttctgccaattgctgcttgctccctgtagttcttccaaacaataactatttgaagttgccattaaacattcaaacaaggggctagagagatggcgcagtgcttaagatcacacactgctatcacaaaggacttaagttcagttcccagcacccacatcaggcagctcacgaccttcctgtaactctggatccagggatatctgccacccctggtctccacaggcacctgctcacatgggcacacccatacgcagacatgcacacatagacataattaagattgatatacaaagcacacacacacacacaatataagatgcaaatctatggggagaaaactcaaaaaagaaaataaaggtggtaagaatgacaggtagagaacggccacgtgctaacatgcctgcatgccccagacacccagggccagtgcaagctgcgagttcaaagacagtaggattccagtcttgaatccttggcctggtatgaggctggtatgagggatgggtagggagctgcagtcagtcctggaaaccactaagaaaggcttaacaaggcagtggccaattaactgggcaaatgtttgaggtgacctgcctagcataagatgctgtgtctcctcccagggctcctggggccattggtcagacaaactgatacatgaattaagttaattggagaaaaactccttccagggaagtggcctttaatgggacaaaggtttttaatctgacaagaatctttgcctgacccaagaaaggacacagtcttcaaaaaggctcttctctctcccaccccactccacccctgcccctgacactctgcttggaagtttgtatccctaagcatctcagagccaaaggtctgggcatctgtaactagggtaggagaggtaggaggttaggagagggctgcacacaacctccagaagaggtgccactccctttcgggtacccaaacgggttctacctgtctcaaacgcaccaggttctggactctatcatatctatgaaggggttgggaggagagacagacacagaggaaggtgtgtctgagtgatgtttaaagaacagggttgggcaaaaccatctgaccttggttggctggggaggagttgcctatgccaatggagacattccatccaaatgggccaagaaatcgtatgtaaggggaaactgttcaaacatgaaggacctacttcagacaaagcaggtggccagggtgagctaagcctatggaataccatccttcccttgagccaccatccatcgaaccctctctcccctttatctcccctcccccattccactttctctcctgccctttcttatgacttgtgactaaagcaagcagctgccaagtgacgtggctttacttaactggaagtacttactgtgtggcgtgagctctggttctacctttaatgatttagccagcatcaccagcagaaagtagacagtaactcaccaccctgcaccccagacctcatcatctgtgtgaacagagtgggggcagggtggaaccacccatcctgaccctgccccaccaggtgagtagatttaggaccaccccagcaccagggcttcccgtgtcagactcacttagtctagactataagtgggtgacagccaaacaggcaagttgcttcccagggtcctacagtggtggtggtgggggagatgattccagaaacatacagttgtcacaggtgggtgaacattattagccttgtatgaggcctgtcaggtgtttaaattatataatggtgacaaacaagtacagaccccagtcatccttcttgtgtggcttactcttctcattattgtaggaaaaagaaaacaactgacaaaagtgacttagggagctttagagatggctcacgacctgaactcaatccccaagacagactcactaacatccgtgtgtgtgtgtgtgtgtgtgtgtgtgtgtgtgtgtgcatgtgcgcgtgcgcatatgggctttgcagatccatcatggtggagaacgcatggcggcagcagtgtgaggcagctgctcacagggcatccacagtcgggaggcagagagagacggatgctgctgattgattcccttcttggtttgagtcagtgtaggagcccagctcaacggacagtgcagcccatatgcagaatgcgtcttttcacttcagctagacctctttaaaagcctccacagatgcacttaaaggtgtgagctaggatatttggcatctctcaggttgagcattaagataaaccaccacatctcattagctcatttcagggccccgggggctgctctgtggtagccacacttaggaagaacacatgaagacttgaactcagcaccaccaataacaaaatgtttattcttactcactctgtgtccatggtgggtctctgtgcccaggccaggttagcaagagctcagctcactgtcacagccccacctcaacaaggctgtccgagggcatctatgtggggaagaggagttatgttaagtgaatgacactccagtttgcccagcctggagttcacacaggttcacttgagtgttcctctggcttgtgaagtgagcactggtggggctaacagcttcgggggatgtaccagctatgaacagctcctcaacacatggccagagatgctaacacagggcagtggagagctggtgctcaggactgtctagaaacccaggcttttcatttctaagctccttggatctgttacagaacctcttttagcatcagtttctcagtctgtgaaatgggccagtgggcactgtaatggtcagcttccattatcaacttgattagattaggaaacagctagagttggtgagacacacctttgggtatgtctaatagggcattcccagcaagatttaactgggaatggaaagaaaactcaccaaatgtagacagcatcgacctatagggctggagccctgaacctaataaaaagtgagaaagctggctcagcatgtccttgtctctctgatgcttggaccacgtctcttctgccaccatgatttccttagcaccgtgaactgtgtgcctctagactgagccaggttaaccccactcataagcaggattttgttgttgctgctgctgctgttgctgttttccaggtcatggccacagcactgtggaaagtcccatatgtgtaacttagtttctaagtgtcccaagatttccttccacgatggtcgaggaagccgagattaggggagcaaaagaaaggggtggcctggccacagactaagacacacacacacacatacacacacacacacacacacacacacacacacacacacacacaaatcacagggagtttgattctagggatggccagaactccccaggagactcatgttgtctccttcgtgggcatcaagattacgtgaggaatatgagaaccagtgtgagttgacattgtccgagctgcaacgggcacagtgttgtcactgcaccagggctggctttgagcgctggcttacacctttcttaaggtctcatgggagagagaacacatgtaggaatggaagcatacatccccatctgaccttgctcccacatgtgaatgcgttaaagtaatagggcgagccctccgccctgcctcgctccccccagggccaaggaaattctctagggaggctgtaaattctgaaaacagactcggagctaatgggtttcaggctggaactcattctctttggggcctcaggagaatgcaatctccttacgcatagcttgggtaccgcttggctattactcccaccttgacctttgtgcctaccaggtatcctggatatccagaaagcaacaatgaattcacaaaaaacaatgcacggttatccatttcaaatgcatcagtcacacagagattcctagtgaccaaacttccccctctcagaagctccaggtgtttaggaacatcaaaaaattaacattttataaacaagagcaaaagatcacattgtttgccaaggcttatgcactgggcccaaggccaggtgtggttcaaggaactggagtgtagaattctagaccttcctctgtgctctctgacactggtaactggtgagtgtggttggtctggcgttccgagtctggtggtcatagactctggaggtcacaccattactttgctgaacccaaggagggagctggcctatctcactcactactgccctctaggcctggctcttagcaaccacacagggaggggagggtggcagagaagggacaggaagtagataaccagtcagttttcacccaggtcagtacaatagtcaaaggttgatggtgggagccgtgaggtggcttagtgtagcactttggcctcaagctgatgacctaagtttgtatttatgctctgtggtgcatatgcacacacacacacacacacacacacacacacacacacacacacatacatgaacacacacacacagagtaaaaaaaaaaataaatcaatggttgcaaactcaagatgggcctgcagaacttgtctgaggacagagccccgattgttattcacacactactgtgggctgtggagatcataaatgcacaaatccaagtcacccttacctgggtgccacaagagcacccccaaagccatgcctgccaccacaggctcacctccgcattcctctggacctgagaacccctcccccactcacaagtggctttcctcgcggtacggaaagtccaagcatggcccacggtctctcccgactctgtgactaccatcacaaacggactttagtcttgccagcgagtgtcttgggatgctttgctggttcttggtttgagcatcgctgatctgtgctgtggatgctcttgtctgacttcttttttatctctcctggcttcttgtttggaagaccgtccctctgagcatagctggagcttgtctatttccgctaccctggctccccgtataggaacatttcacggtatagctattcttctgctgacagccagcatttgggcttgttcctactgggggctattccaagccacactactgccatcattcttgcccctgccttggaatgcaccagtacaactatttcttcagcatggatctctggaaagatgctaatttcacccaactggataatgccatacgtgtctctaaacttgttgaccgatttacctcgtgcgctacttaaacctctcattactgtgacaaaattcttcacaaaggccatttaaggaaggaggggttaacctggctcttggtttgaagacagctgtgcatcgtggtgagaaggcaaggcagcaggagagtgacatggtgctcacagtctggccttggttaggaagaaggaaacagaggaatttggggctgactataaagcttcaaagcccgcccccaggaacccactgcctcacaggctccacctcctaatggttccaccccctccaacataagctgaccatcacatgttcaagcccctgagcctatggggtgctgtttggggtggggaggggcctttgtttatttgtttgagacacagggagggccccgatatatagtcctgaatgacctttaacttgctgtgtagaccaggctggccttgagctcacagagatctgcctgtctctgcctctcaagtgctgggataaaggtgcctgccaccacacttggcccacacttgatatatttaagagttcttgtgaccattaaacatgtttaatttttgctggtcacatgtttaggagatagtcctctcattgtggctttaatggacattttcctaactaggagcacagctaagcatcctagtgttttctcactggctttcttgattgccacttctgtgaagcacctgtccaagtacatgttatttctatcaagttgtgtttattttttttaattattattgattggtagtactctttatatattctggatatttattctttattataactattgcaagcacatttttctgctagtagcttggcttttcactctgtgttggttccttttaagggaagaagtacttaatttcgatctacttgaatttatcagtctgtttccacgtggctagtagattttgtgactttcaaaataaatccttcccagacttcaaggctctgagtttttctacatcatctctactttacagttctactcttcacacccagtttttgacacaatggtatcattaatacacacacgcatacccaatttgctcatttaaatgtgcaggccaaccactgctaatatatccagagttgtacaatcagcagtacacaccatttaaaatattttatcacctccaaaaagaagcggcattcgctagcagtggctgcctgtgttgctatgacaaaatgtctagcagaagaaacttaccaaagaaaattgtagactcgaggcctaaagacagtttctagccctttccaggtgtgtttgaggtgcagaaggttgggcctttacctgctttcttgttccccatttcaccatccattcattcattcattcattcatccaatcatttcttcagagaatggatctcagagctcccttgtgctgccttctacggatggaatccacatttcatttaagtttatccagggtttattttattttatccagggtgtcagatcccctagaactgaagttacagacagttgtaagctgctatgtgggtgctgggaattgaacccgggtcctctggaagagcagccagtgctctaaacagttgagccatctctccagcccctgtgtttacactttcagcttccttggatttaactttttgaatggcgtaagaactggactattttcattatcttttagatgaaccccaaagcacactggcaccatttatttttgaaaatccatttgttcccccagagatctacaagaccctccttgcccggaaatgaagtcttcattcgcaagggcctggagcagggcctgcctgggcaccagctgcacagtcttcctcttcagaatttgcactaagttttgatttttgcccagcaagctcgtattctttgagaaagctgtacagtgctgctgccatgagactctatacaatcctgcaagttgtagcatccaattgtcaagagcaacacacacacacacacacacacacacacacacacacccctgttgaaaattttatttttgttgtattgaatctgtagttcaagacaggaagaattggcatctttccaggacagtgtcttccagtcaataaacatggcatctgcctccatttcttttaagtctggatatcagttgacacaagcaatatgtctgtcctctcccaccatggctctttcagttgtctgtaatattttcttctgtctgtctccacttttttctcacaagggatccattcactttaaatcatgtcagtgtgggaagaaaacattcaccccattcacccagagtctatgcctcgatctcatgtgtgggaaccagatgctgaaacaaggagggatgctgggaagttgcctctaatgggccaaccacagccaacggttgcaaggataagaaaggactttttttttgtcacacagtagcacttcccgtaaagcccctccagccccctttgcccctggcttctttcttgttttctccaaggttccagctgttctgacaaacaaggagctagctagggctttgctgtttcagtctagggaggaaagtcatgattgggggtctttaaaagtcacagctattacttctcattgttgtttttctgattacaaaggtattatgtattatttctagaattttaggaaatacagaaaagcacaaaggagaaaatagaagttatttaccatcacagggaatagcagataatagtatagaatgtaactttataggttgtttttttctttgtgtttatataacacacacaggcacactggtttttcagaatagcactttacacactgatgtcttcattcaaaccatgagtttcttgggcaaaggtctccccaccagatggggagctcactgcaggtctgcagggaatgccttaaagagagatggatgtatcagaaccgttagtgcttatagaccacagccagccattctcatatgggtacgcaagtctgatagccactcaagttgctgtccacttctaaaagactgagattccaaacttccctctcgtatctaggcccacgtcatgagcctgaattttttaaaacaagtggcatctcggtccatctggccgctgaaacacaatactgaccgaatactttaaagagatttattctcacagtcctggagaccaggaagtccatgatggaggtgctggtcaacctggtgtctgtctcatgggggctcccttgctaggatcattctcactttatccagagagggggggaggtctaaataagtctgcctcatatctcttttcttggcttgttgggatatttttgagttccactgtgtaacctaagctgactttgaactctgaatgtagcccaagctagcctcaagcccacagtccttctggctccacttcctggatgctgatatgacaggtgtgcgccaccacacccaacactgtttctttatacaaaggcacgaatctctttgtttaggctctaccttagtggacagttggaggagggactggccagcacagagtagaagactcattagggacagatcaaaagcaccttcctggggccctgtgaaatcaccctttctaattacccttcggggcaggatgaccttgattgacaggagggtcagggttccttttcctgtgggatttccatttcagctcagagagagagaagagatgtctcccttatatctgtgcttctgaggatagctactgtgggaaagcatcgatctgagaagacacttgggagcaagcacttctggggtctgtgcccaactctgccgaccaagcagtgtgtgcctgccctctgtctacactgctgttcctgtgaacctacatgtggccgcccctcctgtgttgttctgtgagaaacatttcctgggaagacacagcacaggtctcctcagcctagaaagggaagccactgctcactgaagtggtgattgcaccaagacttggtgaactgaagagcttttactggggttagtctctggtgtgtgggtgggaggtcacaagaatggggaactggggagcagctgtctgccgaagagcccgcctaacgctggtgacagctcatgagagctgtgacccggagctctctgcacagcttgtaggcagcttgatgggcagaagaatccgctccctggagctcccctggtcagagtctttccccattgcacagcagttattttctatctctgtaagcttgaggaggagtcctaatgaatcctgcaagtttcagcttccccaggcacctctttaatcttgtgagtctccgtctcctcccttttggaaggaatgtttcaatgctgaagaaactgcctagatgcacacagaagtcacccattacacagatttttaatcaatgctcccacacagagaagagcattgttgtgggtagagccagataatgcttcacactgagaattccgcactgcagggaggttagggcacctgtgttcccatgctggacaacacccactaggtgatggtcaggggttccctagcagagaggatgaagcacagcatttgctcagcatgcacccattaaggacctgcttacagacaatgcccactttattctgagcaaagcctttggctgcagtcttgttcattcctccctctggcttgtgactacctctgctggtagagtccttgcgagaaggcagtgctgcaggctgaaaccacatgcatgcccttggccacaaagcagactgttgcagctcgaatcccacattggttattcttgtctgcacatagtaggtctcttactccagagacagattattgtatgatgatcccatgtgtgcaccgtcactcagggttcatttgattattctcaggatgttgcaaggcagtcaacactctggaagattttcccagtccccaaagcccaaagttgaaggtgccagctaaccctttgggtagctccatcaggaaaaatctgaagccctccagaggtctaaataggttatctagctttaaatgacacaaaggctgttcagactttgtcccaagccacatcctgtaaaaaggatgctactggagcacctgtttttgatacaaccaggcttcatggctctttctctgagtgtcacttaaaatgagcctaaaatgaagcagaatctctgtgactgccctcattggtttttaaccaagatacacacacacacacacacacacacacacgctcgcgcacgcgcgcatacacatccacatgcctggaagtaggggtcctgctggctctaggaaatgtgtctgggaggcctggcagatggtgaccagaaggactgagtaatgacacagtcctgactgggaccattcaagagcatggccaccctagtgagcaccagctggcactgagctgagccctctgctctctcctgtcattgcatgttgaggaagatcctgattcacagatgaatccttaggggttcaaggctaagatgacattgcagcctagaaactttatcctatgggggagtcttaggtttttttttatagccatgataaaacttatagcaacttataaaagaaggtgttggatttagggcttatggtttcacaggattagagtacatgataggagaacagaggcatgatgacagtgacagccaagagcttacatcatgatctacaagcaggatgcagagaaggctcactggaaatggtacacgttttttgaaatcttaaagcccactctaaataacacacttcctccaacaaggccacacctcctaatccttcccaaacagttccaccagctggggactgagcaatcaaaggtatgagcctagggtggctattctcattcagtggtctttaaaccctgcctgaaacaatctcctttctaggatcagaaaaaggagaagggtcttcaaaactgcaagccctccatctggatgttggaggaggtatgtgggtagctcacatgtcgttcctgctgttgagtgacaagaaggctgatttcaaacaccctgcctgtcagttgtgagctttcagcccttccctctggaagcagtctctatcaccaaagggtgagccttccaccagctgtgctgtctgcccaggtgatgaatagatggtttttccatcctgggaagaggagattatgagtagaggccacaggactgttttgtgtattgtggagggaagattggccgtatgtatcccttttagctccagagacactgctggtaccttgatattgttcctgcctggtatcagtttatttagtgaagatcctataacagacaatacgcaatgatggctgttgctgtctttgcctataacaggtagaggtggcaggtttttccctgcttcccagctagtagactgcacatgaatgagccaccatggtttatatccctcttaatgatctccacatggatactgaagccattttcccctagtgggtgcttgtgctttgaggatgaagggcagcccagctatggggacaacagcagcttcctccttcccagacaggtctgcactgtcaccaggctagaaagcacatccgctcccagccttctgggcaggtcacaggtattcattctattccttcccttgaaggaacaactccgtatgcttaactttccacattcttctggtgcttgtctgtgagtacaaaggctcccatgacttctacagaaaggtgagccatcacccaccacctcctctctgatcacggtgccaccctgagccccgtgctcacgtcctgggcggcagttcccacctctggctcttgcctcttctagcaccatttcgtctcagagggtacatctgcaattgaagggcaagagaggccaagcctggggctgcctgcagaccagccatcctagggctctgctctgcatggctgccctggaaagcagggctatgcagtcccaccatcaggctgactggttgtaatcatctcctgcctttttctcttctgagctgggacaggtcttctcttcctctgagtatccctcactgctcagcctcctaactatgccttctgccaccatcatcctacatactttgcctgagcctctcagctgggaacacagggcagcacctggttcctcctctgccctggagaacccctgtgtcaggacataatcaggagtatcaagctctgactaaatgcgcagtaccgaatcaaaagatagtcagtcaaagttggagtgaccagaaagcttccagaaaagggaagatggtgaccttggctaagcaaaggagcattaaaacctgactctcctgaggatgtagttggtaaagtagttgcctagcattcacaaagccttgggtttgaaccccagaactgcataaaccaggcatgatgctacatgcccatagccccatcactagcgaaacagagacaggaagataagttcaaggtcctcttcagctacagagtttgataccattctggaatacttgaaattcaatcttaaaataaagagatataactggttatatctttacatttatatcatatttttatttatgtgtataccacagtgtgtgtgtgtgtgtgtgtgtgtgtgtaagccagaatacagcttctgagagttccttctcttcctctaccatgtggatcccagggatggagcccaggtaatcaggtttggcagcaagctctttacccactgagccacctcactgactctggcctgtggttttgccaccaccaggaaatgtctcaactgtggaactcttccaggttaattgatctaagccctggtggtgacaaatgacccaatgacagatttgaaacagaaaaataaatatcacaagggtatggtcctagggtgctggctggggtttctaaacacataccatatagcaggctctcaccagtcaagatggggcctgtcttacacggagatcttacagagaacaaagtaggtcagggaatgaagaggctgggtaccatgtcctggaattctgatctcattgggttgtgactcaaaaccgacttcctgctgggtgtcctccctctgtcctgcatagtcacagggtcagcctgccttcctctcagtcccctgctgttgtagtattctgtgaccctgctaggcattaggcgtctccatgtgaatctcagccaaggtcctatgaggagccgagagtccaggcagtgattaactagaggaccatgtgccttcggtgattagcaagatataccattgcaaagagcagccgttgaataatgagctccttgctttattacaaggcttgactcccttgagccaagtctaaatgccaactgaatcctgaactttgaaagatccaaagagattaacaggagcacagtaagagctaccttggatggctttggaggcaggccatgtgcgggtacagaacccaagccaatcctagaagccagcctctatagcttcctgccctcaccagcaggggtagccaccaatcttggctcaagactgacttttctcaccatgagaactgaatccatctgctggaaaatcccccttcacaagaaagctcttggcctgccaagtgatcttctcttggttaaaaataataaaaaataaaaataaaaagagcaattccaatgggccagacaggggctggggacatggctcagttggcaaagtccttgccttgtaagcaggaggacctgagttgaatccatgtcacaagatccaggcacgttagcacatgctagagaaacagcagagaagagaagcttcccagccggggtgcaagagtttgagtgtgttgtacatagggtactttctccttctggtaatggtacgtgataatacggtcacccctgagcttgcccggccctcaactcccactatttcatatactgaaagccaacttcggaagctgtagaaaactccagaattacatcatttttgtagcatggtaaccctcacaccatcctgctgcatcacactcagtatgtatgccagccctttgtcccgcagctccgaagtatgtatatatatgtgtgtatgtatgtatatgtatataaacatatacatacatatatatatatgtcacctgcctgataagtagttacctcagcattcagaatgactgccacagttcagcaatgcttgcacacacagtttggtacttccagttacagacagtcactgggagtatttgagtccacccacagaagactccagtatgcacgggtcagtgccagccaggaaagcttagctgagcctaggtattcgaaaactgtattggagatcaactgactgactctagacacaccaaatctctagcccagtcagagatggggctagtattacctgctatgtgtgttccaccataatcacactgtaagtgtaataaaactaggtggcatggcccaaacctcaaagatcaacaaaggtgatcttaccagggaacacatatccaggcttaaagtcacttccaaggagccagcgtcaaaacgccaaattcctgatgggacgaagctaatgtgctccagacaaggctggcagggcaggataaaggctcctgcagttctcagaaagtagcatcttgatcctgcttgttgggcttgggtttatccataacacagcacagataacagcattccagctgaccagcaaagaggaatgtgaaattgtgtttggtttctattcaggtctatccctgtcaccagtgagattgtttgatttgttctctcccaaggatcagagcttggcaggctctttaaaaccattgcctttcctttccttttctccattcctgatgtttgattctaaacttctggtgtggtcgacagcagaaaaccccacagcggcggggagcgctgcctccgcatgcttctgagcatctttcatcctccaggcgcaggagagctaaggaaagaaaatttggacatgctgcagctgtttaaatggtcctccatactgtagagtgggacggaacaatgtcgcacactgtggtgatgaaatggccttcctaggataccctaaaacccagggtctgacaggaataaaatgaaacataaactttcccaaggctacttttcaaaaatctcttgaaaactgagaagctgccctgtggctgtccccatgtgtgcttctgggttgcaggtagaccctctggcccaaatcttccacacagttccagaaacagcacctgtgaccccatacagcaccagacagggctgtggactcgtctttattccgctttgtagggacatccacccaaacttcagccagggggagtttctaagcagtcctgggctcaatatttggatcctgaagatggctgcactgttgtaaatgatcatcctgccatatgtgtaagaaacttctaagctgggcagtggtggcacacgcctttaatcccagctctcagatagaggcaagcagatctatgtgagttggaagctagcctggtctacagagtgagttccaggacagccaaggttatatggagaaaccctgtcttgaataaaacaaacaagggggggggtagaaactaatgtatgagtcatgtgctaatactttgaatcactgcagtgagtctagattctaggtgctgggtttcacctggcatttgtcaccttgctatatgtaataggtcctctaggaaggtgacaggagtgacctgggaagcaggaagaaggacatctgctgggtgaccagagaggagttggaactagtatctccttttgcagtcaactgcaccataactttcactcatcaacactctgaggacccactgtgtccttgtggctgctccaagccatgcggacacagagagcagacgctatctacctgcagtccattctcttccctcagggggcgtgcatgtgaagatgctgaggtagaggcatggaggacgagactaatgtgataggtactaaacagctataaggaaggctggggagaggatggtcagagtgcttataacccaagcgtgaagactggattgggaaccccggcatccatgtaaaaagccaagtgtaacaccaacatggggaaaccgtgataggagaatttctggagtttgttggccggtcagcgagctccactattgcactattgaaaatttaagggaaagagcaatcaatgaaagcctggccttgacctctggcctctctgtgcacaagcacacagtacccagagaaaggaagataggcgagtggagtattgcttccataaggagggaggtatggaataggagacaacagtggagcctgggctatgtgctgaagggaaagcagccaggccaaagacctggagaaagagattctaagcaaagcttagcacatgcaaaggccccaggactgggaggagcctgcaagtccaaggcagcagatgcaggccaatgtggctagagcaccggaagtgataggaaagttaatggcagatgaggcgtcagcaaggaacctgagggcgtgggacctggcaggccacagtgagtcacctgggttgcctgtttacattggcagtggcagtgtctgcatggcaaggaaggggacctgaggattgaatccactgctttggtgggtcccatggaaccctgggggtcaggagccttgcattttgcaggatgccaaggcagatggtgaccgtcagcacccccacaccccacccaccatggcaaccttttcagccttcagcgctctgactaactggccattcttcctcttcagcacactctgaagatgctctgttcaggaggaagttgaaatggccagcccctctaataacagaatattgaaaaggtcacagcagtgcagccaagttctcccacctacaaatcacagagagcggcagctcagataactcactctcctgacaaatcaagaagcaaggactgaagaccacaccactgattagggctcatccaaatccaaggcctggggagaaatcgatagagagaacatggctgtcctgtggtgcacagggtcggagcagcagggatgctgattagctagctgatcagtaggtgggagacatgctgccccctggtggctgctcccaggacagcgggagggcctgccttgtttaccatctcagttaggaatgcttccagaggcagttacactctgccccaaagtatggaaaagagcctttccccaaatcattactaagtaaaatgtttgccactgaaaatccaaaaattttattcctttctttccatataatgtgtgtcctttcctattaagaattatttttctggaaattagcttttgctcagacctgatggatcagacacctaggggatcagacctataatcccaagtacttatgaagctgaggcaggaggatggagaatcaaggcctggctagagagatgactcagtaggcaagaacaccttctgtgcaggcctggtaacctaactacaggtgcggttggatgcttgcctgccacactccctgcagtggaggatggaaagagaaggaactctggggctggagtttgctggtcaacagcctagctcaaagttcagtgggaaacttgcatcaaaggaatgaatggagagtcatggagcaacatgcctgatttctttctccggcctctctacaaacaaacaggcatgcacatattcacaaacacatgtgtgcatacatacactctcacacacatgcacacctggatatatactcacacatgtgtgcatggtcacatacacacacacacacacacacagagagtcagtctttgaggaaaaaaaaagcaagcaagaatgtgtaaaactccatcctcataaagcaaagacaggtttacagcttaatttaccatgtagctccacaaacaacgtgaaaggaaaatgatttaattaaagactggacaattaacctgcgtgctaagagagaggacaccacaccgccagagttcctgcatgcaagtccttgtctgtgggcattggcttcagggaatattaatgggtccacaaagctggatttgaagtggaaaactcaccttaagaagaaatctgagaagattaggagagggatgaatgtcagaaacgactctgattaagccatgataaagcacgccaggagctgggagggagaggcggtacatgggagctctttttaaaaccataggccccaagattgcagtgggctttggagataaggggactgacattttgagaagggttgattaaaagcttttcggcacaaatgctcattttcactgggggttgaacacaaaaatccatggagtaaattgaaattctgaatgctaagagaagactcaaagatttactgccacaaattcaattaagtggcaaaaaaaaaaaaaaaaaatggagcatcttcttcagggttcatttagacactagcctcataactgcccaatttcccacgtctgctaatgggataagccccacagggacctcaagtctggacaggaggaccttaactaagggccagtgtgcagccaggcccttggcacggcacagctgatgtctccttgactagaggattcgatgtcaagtagaaacacgctcggtgatccccacccccaccccgaggttccaggccttgagtcaacaggctttactcacaacccacctcatgcctccagaaacacttgacctcagggatgatcagtagtctctagtctcagcactagagagacaggaaggtcaggaattcaaggccagcctaagctacatgaaaccctgtctcagcaaggaataagcagaatgagcagaaggggtaaaattaagtcacctggaatataaacataagaatctggggccctgactgggcactatgagccaccatgtcaggaaaagatcctcagaaatagccaagtcggagagggtgtggtggggggaggggcgggtatgggaaactgaggaacagattgacggcagctgcagtggatgttccctgatgcctgtgagggcagggacaaccagggcaggacccctgctccctgtgacacaccacctaggcaagcaaaggcaccagtcccagccctctccaccacaggcttagctgggaggccatttgacacctggctcgtttccacttctcggtggactatccagatgacttagaaagagaaagggataaagggaggtaattttcttctttgaaaaacgatatagcagaccccaaaccccaaatggaaataaagcaggaacacattagaccagaggagaatcaataaaacagatgaggtttaaagagctgacagcaacaggagacgggagaacaggaattagaagacaagatttttaaatcccagacattaaacgtgagataagatagaaaaagaaggagtaaaaaacataatgaattttgaaattgagtattaaaagggggggctaggttaaaagcatggaaattagtaatgttaaaataaaagtgcgagataatgggacttagactgtaaagcagctgggcccaagaaaaagctgctgaggaaaaagaaggtgtggaggcagggggatgcagaaggaggtcccggcggggcctaccagtacagaatgactaccccctcgcataccctcctgtgtcttccatgtgctttccagaagggcagttttcagattttagccaggaaaagctgtcctgtgatgcttgaagatgcagacacctcagcccttgacctcttagtaaaaccctagtggatggtcagtgagctccacagaatgatctagaatgatccattgctcaatgcaatggggtattgggctaatgaggactagttagctagtgtgtaagtggacaaatgagcacaccccacacacaacatctttctggaagcaatgactgggaacccagccagatcctctttcagatggaatgcccattttttagaacaaattcaatgtcccctctatggccctgaaatgatagcatagacttccatgtatctcttccaaataggatgtgttaactgatactgttgtgaggaccattagtggaagatgctgccgctgtccgataggcaggtcctgatgcaaagccactgcagaattcctaacaatggagcctgatgcctctgtgtatgcaagcacagacgatacaggtgcactgagttggcagttcctgggccacctgctgtgttaccacgggcaacacaataatagtaaacaacttttgataaagttctgaacaaagcaacatatattcttctgttggttttcatagttgtcataagccaggaaaattccaactacatttagccatgctgaaaggaccgtgtgttcacgtccaactggagcccgttctggcttcaatggctattgacattttcacaccagttttcaaatgaggggcagggacagatgacgatttgctcgtgagagggcatagcctgtgccactcagaaagtctggcatctctggttttgtcatctcagtattaacagcaatcaatcattgtaactactgaaaatattctggaactttgcagaaaaactgctgtgagctctgtcctactcggaaccattttagaaggagatgcttaaccaacagctctgaattttctcgtggctaccacatcataattgccccaactcagttttgcaaaaagaagttcaatgaatacttataggaacaatagcagagaaccctgcaggagacacctgtgagtcttggccaagaagtccctgtcagacactccagggagccctgttgattaccggacagagacaagaaaataacagtggagaaaggatagagcagctacaaaacagaaaagggatgtgagcccagcagaggcagacaactactgaaagatggccagcacatgaccagcacatgaccagccaaccttcgtaatgagccacacataagagaaaaggcctgacccccaatgagagttgtagatagccatcaagaattcttgtagttggaaaagcactgatttgcaagtaggagttcaatctgaagagcccaggctttaaaaaaaaaaaaaaaaaaaaaaaagtcaggcacagtacactagacaggcagaggcaggcagatcctaagactcattgaccagctaagcctaatttgtagagacccagatcaataagaaacctttccttaaaaaatagtgacagtatatcccaaggtagatggtgcctggggaacaatgcctgaggttgtcctctggcctctacactcacacacagagacacaatgacacaattatttcatcaaccttaaaatcctcaaatgctacacaaaggcaggaggcttccactcctaggatagattccatcccaaatacaaaaacaattcttgggaaaatctagaaaaaagaaatgccagtgccatagaatagggatattctgcctgctcagaaagtttattggtgccatccgaggtcagaagtcaggtttcagacttactctccagaatccgggactcggggaaagttaactaactccatgttcttattctgagtcggttaactcatttctgaattggtttcttagtcagcagagaccttcgaggtttataaactccaagggaagggaaaggtagacattcaattccgttattgttattgaacagttttattctcaatgatttaactcccccaagttttgccttaggagaaaagaaatcattatagcatacgatggcaattaaactcgcctgtgccagggagtatccattgtggtgataattggaagacacgggggcgtggcggggatgccgtcttaggagagatggagacatcctctgttactctggaaccttatttaggatttctggagggtgatacattgctgctcttcactgcctgaaattaaagtgggtatcagaaacaccagctcctctatgatctcattttaacgtcttcccttcgagtgattagatgatgtaaagataactttgctttttaaacgaaccatctcttgtttccctgtaactgtaatcacatcagttgggtctttgcctctggaattttattgccttgcctcggttccccctccaggcgagcaaactcggtaaatgtaaaggcagttcacaaatcatgaaagctgggttattacagaaacacacacatatatattattgactgaaaagcaaaccccagagacactaatcataatatttatgctctttaacttgaggtttgaagcaagaatattttcagatacagatggtgtgaaatgatcattggaaccataacattttcttgtgttaaagtcagagcctggagttagctttggattaagtttccttctaattcgctgtaaaaatgggctttaggaggtgctgaggggaagcgttagtccctttgatatttatatttacacacacacaaatatatgcacatatattaagagtgtgtgtgcaacaaaacaccacgacaagacaacttacagaagaaagagtttttggggccctacagtttcagagggtgagtccatgactattgtggtacatagggacaggtaggcaggcaggcaggcaggcatgattttggagcagtagctgagagctcacatcttgagagaacagccacaaggcagataagacgatctaattagaaatggtgtggacttttgaaacctcaaagcccagccccagagacacatctcttccaataagaccacaactcctaatctttcacaaagtgtttcatcaaccagggacctactattcaaatctatgagcctatggggccattctctatcaacacccccctcccccagtacacacctcagccccataggttcctggccaatgcattttgtccaacttcaaaatccctatagtctttcttagtctcaacacaatttaaaagttccagttgtttctgaggattcaaggcagtctcttaactgtaaacctctgtaaaatcaaaaagtaaattacatatttccaacttacaatggcccagagcatgtgttagcattccaagcggaagggaggggagaacagtgaggaaatactggaccacagcaaggctgaaaccagagggggactccgaatcccgttactccaggtcttgtgtcaaagggcttagatggttctgcccttctagctttgctgatgacttctccgttgggctctccagctccctgtctgcaggggtaaacggactttccagcaactgtgaaggcaagcacccacgacacaaagtctctttcactctcatcctcttgtctagggtgccaccagaagaggattcccatacttagagtgggtcttccctttcaaataatctatccgaggcagcccctcacaggagtgcccagcaagcttgcatttcagttgcttacaggcctggtgaagctgactaccacgatttgccacccccatggtcctagtcccgatatcaccctagtccctacaatctgggtttgcgtagaatcctaactgagccaaagaagcactcttgcaataagaaggccctgaaggtgtggggaaatggtagcatttatggatctgttatttggaaaggcagagttcaaggaaagaatcctttcagccttagaaagggataatatgagagctccaagccttagctgaactcggagccttctaaacaatgttctgcaaaagggacaataaaggctagagacttcagaaatccctcccctgactcccagtttacctgtgcatctgacttgctgccagccagggtccctgtgactggtaatgggcatatcatctcagtgcacggcactgagtaaccccacctctgaattagaagaaggacggggagggggagagcattcattgtctgaaagagacagacttacaacagagaaatcttaacaggaaagggtctgtttcccttcaagccactgctcttaccctggtctaagcttatgatagatttcaaacagtttgctttcctctctcatttgccagagaagtcatgtgaccacacaggttagccatgtacaggtccctgtttgagtctgcccatgggttcccttgtgtcccagtcctgtactcgtacttcaaggacctggtgaacttaggagctaacatggcctgtagctgagcctgtgccccacctccgacctgcagtttgaaaggaggtgacagacctatggaaagactcgggcagggaggcaggcatgaaagatagccagacttctatccttagtaggcccttccatccttctccatgcatccttctctgtgaatgtctagttttgtgacatccctgatgcttacaaagaagcaggattccccacccacctttttggtacctggtccccacctgagaacatatgtaacggggacctccaacctgtccccttctgagttggccaatttgtgcaggagatggctggacctgggctcctgggcctggccctgccaccaaagctccccatgacattccttcctctctaggtgcctcctcccagaggagctcatggtctccgcctactagtccaggtttagtgggtctgttgagtatgcccaaaactcatcctttgtctgtgtcaacgatggtgaagggacacagcccagcactgccaccagcagccttgaggagtcccttcctgcttcgaggcctccactcagacagagcagaatccttgactatgatgcaagaaaggacttatttcaggatgagccaagcgaagcaaagttagtttatcaaagcaggggagaaagcctgagactatagcatggggatgcgaggtggacttagaaatgacagtatgcataatatgcgtacataacacagagtgagcctctttaaaaatttttgagattgtaatttaattacaacatttattccttcccattcctccctccaaatcctctcatatgcccctccctactcattcaaactcatggcctcttttcttattaattgctattgtatacatattggcactggccatccagttggtgtctcttgccctgggaaagaccatctctcccactcctagccttccttagtcccttaaagttctttgtgtagggttgaggccttgtggacttttcccagtctagtttggcatgatcattttatcacagaaacaaacaaacaaacaaaaaacaagccagaacaagtcccctatccctgccctatcagaatggcacttggtttgaacatggacactacacattaacaaggacatggccctactaacatctgcctcaggagctcagcatgcatataaccagacttctgcaaacatcagatggtcccagattcagtcagcatcaaacagagcctcccaggggaggatagaagtctccagaccaacaggcagtgagaggtctgcccccctccacacacacacactcactagatgcacacacacatactctgtcactcactagcatgcgcacacacacatacacacactctatcgtgcgcacacacaagtacatatgcattaaagagcacccttgaaagtccagcccaccatctggagggaagcatcactctatagccatagctttaccgggaggataatggagtctgcccggccaggcttttgactttcaaggtcagcagcaagcctgaggctcagcccacttgcttctcccaatctctaggaagtggcctctgactacctgcctggtgcccatcctcttgccactctgaggaccatgggaggggccaagccaatctctgggcacaagcagcttacacggttgggacgttaaagtccacagccggcagtaaccagccaggccaggtggccacgagactgctgaggggcagaagggctggattcctgggcttgtgccgcctgtagtctccagcatgtcctctccatctcgggacgtctgtgcactgtcacccctgagctctgagccgggaagctctcaagcctgtccaccatgcccaccagttttgaaaccattcacagatgactttcagcagcctctgagcaggagtgagcctcacccttcccccgaccccccagcctcctgcactggctctcacctgggtcttactgagcccctccaaggagaagaggccagctacaggacccctttctactccatcttcccagggagggaggcccctgggttcttcccggctccccagcttgcactcccaagtttatgagttgcgccgttccatttcttgctataaaaagccaaggttttagagctttagaaataaattattttttcaaaaaaaggctgtcttctgcaaattgaaagccttagttttcagaaaattgtctcttgctctgagtttcaagagccaagaatttgacactttgatattctgtgccccacctctgcccatgctctcaccccggctgggacaggcggccttctgcctcatttattactgaaggaactgaggaagaaaagatcacttgctgaaaataaggtgggaggggaggggggccactggttattgttttttgaaacagtcttgctcacctagctatggcttaggaggagacagggcagtggattcttatcttctgagtgatgtgtgtgtcctctgatgcatgctagcagctacagcccatgactgctgtacttcagtaggaacactggggtcctctccatgtggacagcaagcaagggtctctcctcagcagttggaggccatttgggaaaccaaggctcattccaagccttccatgctgctggaacaagattaagctcaggacagatagtcgtggctgaaatggaaagtttccatctgcgggaatgcggaatgggggttgttatgggcctgatttgtgaacttgaacgagggccttctagaaagccatttgtaaaattcatggccgtctccagctaccactaacacattccatcttccatcttctctgaccaggcaatttaacattccacacatttaaaaattagagtggatgctggaggggcgagtgggaaagtggggggtggggaagggcgcgcctgagctgaaaaaaacatgaatgaggtgaggcttccttgcagcctccatacgcagcctccacacttacctcccatagcaccaggggccagtctgcctgctcactccttaaagggatttctaagacactggggacttctgccccagctgtaaagttcagaaagccaaggagcttttagctgaatattgcccacttcttcacacctctgcccctctctgtcccctctacccctcgctacctccctcagccactctctgccccctctgctccctccacccccttctgcctctctctgacccctctgcccctctctgcctgcctctgccccctttacctctctctgcccacctctaccccctccgtgctcactctgccccctcagcccccctctgccactctctgtctccctctgcccctctctgcccacctctgcccctctctgcccacctctgccctctcttccctctctctgccccctctgcctccctctgctccctctctgctctactctggccctctctgcctccctctgcctctctctgcccaagactttatatcctcaaagactgaccctctgaaggtttcagatattatgaacaaaaggcctggggtcccatcctggcaggagtggagtatgagctacagttgggattcggaagcactgcaagcgacatatagtggtatataattgacctgaacgcagttcaattctgaaattccaacacattctgaggtcactgaagccatcttgcatcctttctggaacaaaatcttctctagcaaagaaccattcgaacttctgatcaactttccagatataagtatagtgttaaaatgaaggtggccctggattcaggccctagcctccatagactgggtgttgtagtacatgcctagggtcccagcccttgggaggtacaggcaaaacaatcaagagttcaaggtcatccttggttacacagtgtgtttgaagctacttcatactttgcctggaaaataaagtaatcaattaaagtaatcaaaaaaagtaatttcctggctggggagtggctcagagggtgggtggttgttgcacaaacctgaatcacaggtcctgccttgctcaggttgggggtcagggttgtgttcagttattactataaccagtaatgtcctggggaccaaattacataatgctaatctgtcttcaaggagctttaagtccaagaatattgggattagggggcaagtccatcagtctgcctgtctgtcctctacctgagtttcttaaagctctggttttgattgagccagtctggtgacatatctcccccaccccgggatgagacactcacagccacagagcacccagtgtcttatgactgcattattgaacctattatagagaaggggactgatgagcagggaccggggccatgccgagatcacaaaagacaggagccagtgtggatgaaatgaacacatagccctggggacatagaacaggaagtagatttaacgatataataaaaatccataggaagactttagaaagtaatattttcatgaaataagaacaggatgctatggaaaagagggaaataagggaagaaatacttcttggaaattaaaaatccaattggtaaaaatttttaaatgtggtagatgggtatcaaagtaacactgtctcagacacaaaaaccatcgtcttccttctactttttccatttgcatgggtgtgcatagtatgtatatgtctatatacagatgtgtgagtgcttgcacatgtgtgtgtgtgcttgcacttggagactcaaggtttgtgtcaggaaccatccacctgtgcttttgccttattcactgagtcaggatctctcaatcaagcccagagctcaccgatatggccagttccccctagccagcttgctctacagacccttgcctctctgtcttctgaggctggaatcagagatgggccatcacacccacctggtattttacgtggcttctagaaactcgagtcctcatgatcatatgataagcactttagctgctgggtcatctctccagccgccttcttccctaaaagagaaaaaggaaacgtattagtgtttatactcactatgcaaaatgatgggtttcataaggaccttttaattcatgtttgtcatggactgtggccatatttgtccatctggctctcctgtctcaccctcccattagtcccagataatccctctttctttcatgtgcatgcacatgcatacatacatacaaagccctatatttgagagaatgtttatatttgtctgagtctggcttacctggcttgctgggggaaaaggcaaaatataaaaggaatcaaagaaaggaaacctggcccaagaaaactcagcactaagcaggtgtacagcaaaacaaatcccagaaagagatagatcaacagcaccagacgcctggaggatgagaacctggcacgatgatggtgtgcatctggaatcccaactacatgagaggctgaggcaggacctaggaattagtgaccagcatgagcagtgtagagaagaagaccttatcttcagcaaaaaggaagtaaccttgaaaatgacccatttgggggctgatgagatggctcagtgggtaagagcaccccactgctcttctgaaggtcccgagttcaaatcccagcaaccaaatggtggctcacaaccatctgtaacgaaatctgatgtcctcttctggtgtgtctgaagtgtacttacatgtaataaataaataaatctttaaaaaaaaaaaaagaaaatgacccattcaccttagaataagaacataatagtcaatagtgttgactcactctcaagaaggaagttcattccatccaaccaaaataaggtcagagacaggactggggctggagcttagttggtagagtatgtaacacacaccaagtctcggattcaattcctagtacaatataaataggcatggtggctcatacctgtgatccctgtacttgggaggttaaagcaagtttcagaagtttgggctggagagatggctcagcagttaaaagcattgactgttcttccagaggtcttgagttcaattcccagaaccagaccgtggctcataatcatctgtaatgggatgtgatgtcctcttctggaatgtctgaagacagcaacagtgacagggtactcacatacataaaataaaaataaatctttaaaaaaaaaaaagttcaaggtcatcattggctacatccttggcaagtccaaagccagcctgggctacaggagacccagtgtccaaaacaagacagaaaaataaagtcaaagcttgaccctgtcctaaaaacaagacaaaaaaataaagcaagaccttaatggaagtgtgtacattgtctttcaataggttttctgcatgtatatgacatgcatacatgtgtgtgtgtctctgtgtgtctctgtgtgtctgtgtgtctctgtgtgtacatgaatgtgcaggtctaggtataagtccatcgttgatatctggtgtctccctcagagctcacgctgctcttgccacctcccggccctgcctcggggtgctgagaagctgcctgtttttctgtgggttctgaggctctgagctccagcccacatgcagcaagcacttcatccattgagctgtctctcccctcacctctcagtgcatcttacggggaattaaaagttctagaaaagacagatagctaaacaagagaagcacggccacatgttaaacaaaccactatccctcgtgattcgcagcagtggaggagaggcgaagactgaaattccagtctccaaacagcaagggtgacttgcctgtgctgccggcaggggccctgccctgtgctgtgcttcatctcctgccagggatgataggaacttgaggatacactgacactgcatttagcatcatgtctgccatcaaggaatagaagcttaaactcactacttttagtaacagataaaaggcgttgtaagagtcataagttgggtgacttctgattggtagtaagaggcgatttttgaattttacttttgtttcatcttacttattgtgtgtatttgtgtgtgtgcacatgtttctgccatggcatgaggatgggagtcagaggacagctcatagtggactctctccctccaccgtgtgggttccggggattgaactcgggtcgttagccttggtggcaagcccctttaccctctgagtcatattacaagtccaaatttcatttcctatggtgcacatggcttggctttttaaatgttttccaaaatgatgctacattagacatcaaaagatgtttcaaaggctatctcggactggtaagaatctgttttcggttctgtgccttttactgtatttttatttattttgctgttctccaaagagtacggtgtagaatggttcaatacattttctcagctgaaaatgccagtgtatttatgtaatgaaaatgccaatatgtacgtatatatttaaaattagcatagaaatgattaaggcagttcaggattgatcaataatcatatttgatttgggttttcttattttgcctccttcagtcatcctgggctttgatatttattaccacccactgagactctggccttaactaaatagaagttgcttggggaaattcacagtccggggattgaatggaagcggctgccggatacagaattagctccggcagagtaaacagaagcccaggaagcctgcactgcgcctttgataaaaatgtctcccctgtctggacacagcagagccaacagtgccacactgtagcccccagttatgaaagtttcccattccaagaataggggcagggtcctctctcaaacataccaagtgggttttaccaaatacttatttctaagtggggggaagggaggagagagagagagagagagagagagagagagagagagagagagagggagggagggagggagggagggagggagggagggagggagggagggagagagagagagagagagagagaaatatatatgtgcttgattggatagcaagtggatgcacatctggaggccagaggtccatatcagatctccccctcaattgttctctatcatattcactttttaaagcagggtgtttctatgcccctgaagcccactcgcctggctggtcagcaagctttaaggatcttcctatctctatgtgccaccatacccagctcttcacatgggtgccggggggttaaatcaggtcttcctgcttgtgaaccatctcctcacacccaaatactgtaaaatgtatggtgctgtgatttgtggatgtgatttgtcccccagaaggtcatgagcttagtcaccagtatgtgagaattgaaaggcagagggccctttcagaagaaggccaggtaattaggtcacggggcacagctatctgacaggaattaagacctcaactagattcctcaggagaatagggtgaacccaacaattgactctggctccttacttcatcttacagtccttgtgacacattctcactattgtcacacacacacacacactcaggctctcaacagcagtaaaatacatggacttgcccaatctcggactttcagcctccagaactgtacccagccttgggtatgttgttatagcaacaacaacaaataacttcctgcatgtgactctcagaccctagaagaatgagttacctctttgacttttctgtgatgtttggagactgctgaagagttcctagggagtgagcagtgacacaggtccaaccttccgggagtccagacaggctgagcatcggaccccagttgacgtatgcctgccttctgttggcatagcgaactcaagagacactgcagagcatgggtccagagaggttctggttttccacagttgctaaggaaacctgcaccccactttattgcttgctaattgaaatgaaatggatttttccaggataggtgacccgagtccttagcagaatacataacaatccatcatgggacaagagagatatccctagtgattggccagcaggggtggcccacccggcctgtccatcctcagaagaaaggaaaggccaggagagttcctgaccttcagggtgtccaaggctcctgggaagcagtgccctggggatgaggatccatgaacacccagaaaccagagtcccctggaaaaagcaaatgtgtagcaccagtcacaatgcacagatgcgcaacgtaaggcaagtggccaaggaagatgaagaagcagaggtggcagggcaggggcaatgcctctgtcagtctgtaaagcacttgccgtataagtgcaaggacctgagttcagtcctcagaacctgtgtaggaaagaaagcctgtatgtgtaagcccagagctgggagacatggaggcaggaggacagggggatccctggggctgactgtcactgtcagctgatgagttctaagtcagtaagagaccctgactaagaaaagtaaaatagacagctcctgaggaacaacactggagacctctggcctccacatggacatgtaacacacacacacacacacacacacacacacacacacacggaataataaaaaggtgatcggtcttgtttgtctggagcctttatgttttcttttgtccaaatgtcttagaatcactatgagaaggagaacttttaaggctgcaatttagttctctgcatcgaacaattcagcacatgcccaggggctctgtctaacgtcacacctaatgaactgcagtgtaagacaccgggtgacggagactcaaccaggctgcctgggctccctgccttcttccctctcccattctctctgcagagggagaacacttcatcactcacaaattacctacttccagtggagagatggctttcatgcctcttttttttttcccctttgaaaatgtgtcaccatccccaggggcatttcccactccacaggagctatatcagccaggcatctgtccatctctgcgagcctgcttagcagaggtcaaggaagtaagagggctgaggatcggggacactgccagcttgcctgggtcccaggcctctagagtaaacccaccaaatgccctcttttctactgagccacaactttgcccacccaccaggctgaacctgtcttttatacaggactgacatttcttgtgtgtgtgtgtgtgtgtgtgtgtgtgtgtgtgtgtgtgtgtgtgtgtgtgtgtgtgtgttatgaggcgcagaggcctgctgctctccacagcttacttgtagcctccttggcctgatactgacagcaggctccacagatctatgtacactgagcccctgtgtttagggttaaaaacagtgcttgcctcttcactgagtacgcatgacacaaaggcggtgtgtgtgcagagacacaggacttctcttcctgctctggcaaaagacagccttaacctgtcagttttgattccaaactggccttaatctcaccccttctccagccctgtcaccatctgagctctgcctcttcattccatgacccacagccctcccctgacactctgtggactctctagtatggcttctttctcatcccaggcttaccaccccctgaggcttgtgaccctgataaggtcagggtcagactataggacactaggggctcatccgtcaataaagtaaagattgtgaaattctttcttgccgtatgggtgagtacactaaggttcagagagattaagtaataaaccagaaatcacacggcttgcaagtggtgatggacaggtggaatatgatcaagccagacacagagccctggaggttgggaaggctggaggaaaggaaaggacctgaagttggtatacacacacacacacacacacacacacacacacacacacacaatgttgatagctgagtgtgttctctttacacacaagcatgagggagtaaagtatagcatgagctaacccacctatgataccctcaccccctcctcacatccctcccctcccttacctttacacccccaaagggcacttgagagggactacagattacaagcggaaacatgctagcgggacgaatgggctctgtatagctgtgctatggctcctgagtacttgcttagccgcccagcaggaagccagcacccagctaaggacagtgatctcagccttgggctagaccttgggtagtctatgcagatgtgttcaggtgactgtacagatttctatttcccatttattactagtgagagatggtgtctgaagagatcatgtacagcacacccccctgggagagtggccaacccctgggctgtgtaacaaagggtgttgggggctgctaggcctatgctgtgcggcagtgactttggaggcctctggtgccatacacctgggttggacagtggttctgaagtctggccgcacctccatcctcagcaaggcaccagacaccatatagaaagaactggactcaaaaatcagataaccccagctgctcattaccttggaggctccctcctatcttggggcgcaccgcacgttgctgtggagttatctgagtgagttattttattccttttttatgtcctgagcaaacccccatcatcattttattaatgtatttgcaattactggataatgatttctggttgcgtgtggtctgtgatatggggacacttaatcaaatatccacaggacgggcatttaagttctctggggccagaagcttttcccatcaattaggcttcaaagaaatgggtttcaggcccatctacaactgcatttttatgtgtctttcatgactccctggcctccccctggtgtctttagagatatcaggaaatgggatgcggggcagaggcatctattagtgggtgtgcagagaatgggtttataatgtggctacagagtattaaagtgactgctttgcagcagggtgacttatgttcccttgacagtcactctgtgatgttctctatacacagagccaccaggaagagagattcgttggcccagtgaactccctggaatcaagcccaagggggtgcttcctctggaaagaggctcaacctccagaaccttccacatccccaccctttcccctccaacacagaagagctagggatccgacttactaaaatacaggctgtctctttattgtctagcatcctctcctggaccactgactcctgcaccatggacacatgggttatcatagctcagaaatcagggctggaggcctgagcgtctagcaaacagaccggttctgctctgctacaccttggcctgtatgtgagtgctcaggggactctggacttttcatggagcaactgggtaatatccttttacggtcacttcttcagagaggcgatgttatgtagcactggagagccattaagggaaagctcttctccttctggtctagagagtgcagtctacatctgctattgggttgaggctgttccaggctacccaagacatgagataatcctatcaatcacctggtctaggcactacccttcaagaaggtagatgtaagttataccaaagagataggaggaataagtattccttagatgaggtaatgtgcttgcccttcccagaatctccatgttctgcacagtccctactgagccaccatgatgttctgtgacgtagtcagcctacacccctgaatcctaattcagaaagacatcgctttccctctgtcctctgtctctttcttttggatgctggccagagtctaagtatgctttttctagttccttgggcttcccctgttttcctctgaagatgcccaagcccctgacgttttgccgtacgcgatttgtccaacacatggctgatctccaacacatggtgacttaactcaaatgtcgtggctttctctcttcctcttcatcattctcccctagcaggcagatgccaagatctccagtttaccggccctcaggttttgcttttagagtctaagaaaactgtcctcacgccctgaactataagcgcacaggaagaggacaagagggaggattctgagtctcaatgctcgtcaacactcagttcagagctcagaccctggtgttcaaggctggagtcagccagaaccaggcttctagaactctcaccatttctctgtccctgtcttcatttgggaaggaagtaggcccagtggaggctaagagaaggctatgtatggggtgttcatctttgggggaacaagtgactgccctgtgacctgccagaagtggtaaggtatgtctgtctcagtcaaaacagctaaagacaaagttgtcttggctcttattccacgacagaagagaggtagacaacaaggagaagagacaatgggttctcgaaaatgcaggcctaacccagctaggtgccaagcaagactcagaagatcagaatttcgccaaatggggcaaggtcccaggggatgcccagcctgtctaggggacaaaagctgactctgagtgcccagaaatgacatgtgaaaagctgcctccccagcctctgttcagtgtcttgatgaatgagatcttccttggctcccaggtacagaatagaaactgaaaagcctacggcatctgctgtgttccatcaaactgtggactcaaaggcatgagctgaacaaagactgtcattaaagaagtgggtggcttccgaaatggaattactgccggtgttctcatctgaagtttgcaagccagctgatggtctcattccttttagtctaccactgtttcctaggagccattagcttcatgaagtcatttaaaactataattatggccatttattggcatagacataatcctgataactggacgcagatccactccttggcatgtcttggactccccttgcatgcttacacaccccagtgaatcacagagtatgtgttcacttgctgtgaaccaatggactgccgttacatgactggggtgatcgggaggagtcagtagggtatttaaggctagccccggggttgttcggtggattcccgttcctgcattgcaatgtgaagtgttcctgaataaacctgcttgaagagggacaatgtggtgttgcgtctttcctgctgggcgaggtggatgcgacagctcaagtcacccaacctatcagtgaccatatgtcttgaacatatactgtatgttgtctctctatgatccccattgtgtcccatgagtctggagaaacctgagaaggtgcagaagtagctgtgccctggggtagattcagtgtgactgaaaacattggtgtttctctccacccagctttagggcaccaaatgcctagagggactcatgggagatcagctcaggatatggagtcagaatgtgccggagcagatgaagaacatagctggcaggtgcagaggtcctgggccaacatgccacaaggctgcttagatagggggaaagcaagtcaatattcaagagggaggaatgagtgtggggccttcgttacaagtctagacacgacttccttaatccgtgtcctagccctgccttggcaggtaacaaactccatgatgccatcccttgcctgcatgtcatggagaaagtggcactcctgagaagactgggggcagtggggaggatcctctgaggctgactgataaccaggtgtgttttatggggccttaacacgaggggactgccgttcagttcagggttcaacttgaaatctaaagttaaatctgaaagcccagacagtgatccgcatgcttatgaattctcagcacaggataagcatcctggtcaccgatgcctgtcaagccaaatgttcagcatggttataaattatctcctggggtggagtgcatgctcctctactccctccgtgtaagcaagctgaaaggggagtgcctagggttaattattctgtctgcaccgttgccagacatctcctgtgggcatggtaggtgtaacaaccacagccagtctcagacagtcccctcagtggttcatgaggccccatctgcttaggggtgttaccttccacagtggaaagaagaccaacagtgcacgtttgtggtctatgtgatctggatcagaaaacagaagctggccagggaagatattctagaaggaaagaaggcatgatctatccaaagaaggcgagtcagaactcagccacacggggctctttcaggtagaggagctcactaagaaaagccaagaggaagtcaagctgtgactgtctgtacccaacctaagagctgcatgaggcatgactggcccatgaaatgaagataccaaggactcatgttagttccttctggacaggaagtctttaatatccatatctgtgtcctgtaaaccaaagccaggcccataggggcagagacccagctgtgcccatgtctttcaatcctcagtggcccaggagcagggattatcatcctagctcttgggtctagtccttcatattttcttcagagttgagggtaagagtgaggccagggtgtgaggatgtctgtggggtcctctgacttctaggctccttcattcttcctcctttgacactgagcaaaccctcagactacacaggcagccttctccccagtgtctcaggcctggaatattctacaggtgactattccagaaggtgggcaatgcagtttctaccagaagagatgctcggccctgggtagcttgttaaccaaaggcaaagagttggagaccaataagcccaaagccactggtctccaccctcccttgtccccaagcctggatatggctaaggtatgcagttaatgtctttcagttgttgagaaacaaagggctacatttctctctttttatgcgcgcatgttttttgcaactgtgtgggcacatgtacctgtgtgcacatgcgtgtggaggcccatgatcgacatcaagaatcatcttcactcatccaccttatactttgaggaaaggtctttcaatcaaacccagagtttgctgataaggttaatcttcctggccagcttgctcctaggacctctatctctgccatccatatcttgccagtatttatatgggtttctggagacctgagctctggtgcttattcttacgtaacaagtattctaaccgttgagcgatcccccagcccccggttacctgctaactaaaacaattactaaagtccaacacatacagaaaagtgtcataaacatacagctcatgagcttccctttagtctaccacacatctgggcagccagcacccagggcaggagaccaagtcttcccagcaccctgaagtgccctactgcagagcatactcaatgctctaccccagcacagctactctttagcaggcttttggaagagagggaggtacaagtcaggaagtggctgctggaagggacacttgttctgggaattggctacagataactcttctcagttaaaagactggcaagtctatcactgtggactttggttttctgggttctgaatgtctgggctaaatccagactcttgaatctctaagccaagactctgaccagaaatggcagcatgttccagtgtgttcacgataacaagatttgccagtaagaagccttggtcgtaagcacagggttcttaaagcttccctgggctgtggatcatcgtcctctgtcatagctcagcgcctcacctccagcctcagcccccagctgtactctcatctctgaaggttccttcacaagagccagatggctgaaatcagaagagaaagcaggtgtcgctggaacagacaatgcccccagcagtgtgccacaccacatgccaggcaattgtagactgactctatgaccagggccttgccccttagactaagcctctttcttactgggtctcttttctaatcaataataaataaggagccgactgcatcattccaaaccttcactcagctcttggggtctgcagcctatggtgggctggctaagaggcaagccaagagggagacgggctatggctgagatcctggcatagggcattgtctttggagtgcatatccaaatccacatctctgtgtgtgaggaacagagagtggggatgcctgcctactaccagcacttggtgtaaatatggcccaccccatgagtgtgagctgtctcccatggtcctgtctggacttacccttgatctgggagctgcaggccttgtgggagaaatgaaagtgtcacaccttccttctgaaaatcccaccaggacatcattctcctcagagcacttgttcatgaggagaacaaaactcaaggtcggagagtgattgactttttcactgagggctcctggttttgttaggggccatcagcatgagaggatgagatttctgagaaacctctgatgtgcaagaatacaccacacacacacatatggagggaggaatagcacagcgtatttctgcatcaaaacttcatgagatatttttttttctaatacgttctcaaagtctaattccaaagaaatgtagacaatcctgacctgaggcatgtggtataggtgggctacactatatacacagggcagggtccttgcctaggctctgaggcacgaagggcctccagctacatgctgctggccccacttctctgggtcctggcacgcttccagaggtgttcctgcttcttcctctgggaatcaggacatggtcctctcgctcccgaggtctccttgggccctgaaccctttcaaagcatgtgaatccatttccatgctggaccagagcagctaggcggctgtgctggggcttggagaacttatgaatatggaaggcagagagggccaaggggatttcttggtgtgggaatgtagcaagagccagcctatcctcagactcccatcccgctactgcgtttgtggtgtttcaggtgcagcccaagcagagatgtgtctggaataactcagccggttgggggagaatggctttgtgggtactcggaggagagcagccagggtcctttcccattcacgctgcccgcttccctcataggtcattcactgctcagtaccgggccctcctctggatgccagacctgaagctggcccccgacctactaaggggcttcaggttaaaaaccctgaatgtcccacctgggtctgacatccacagagtcaaggtttcctacaactcatccataagctgctggatcctggaagtttccagtctgagcagtccccagctggtagactgcaggggggaagccttctcccctccatcttacagtcccagtactgcatacatacccatgctctgtctgcaacatcgctgatctggctccgagttcccaggtagctttgtttggttttgacctgggatttactatcaatctcccaacacaaaaaggtaaagagcaggctcgaaaccccaggaaatccccaaatcctgtctagtctaaacctgttcagcttctccctgagatgttgttttctggaagcctgggttaggacaagcctctagagacccccaggaggccgtttgcccagctctgtggagcttctctaggcgagatgcccagagtattagcgtgttgagtgtagctcctcgctggcatcaatacatgcccctcataccaaaaagatgagcatcttcgagcagcctttaaaatctagtggctttttggctcagcccagagactgacaattaccgtgtcaaagcaagaagccctgagataatccctcaggcagtgccaggcagtgccaggcagtgagacaccgtccggcactctggcctgctccatctgctcacacggtcagtcattcacttccatgacttggatattccacaactcaaatgagattcctggccagtaaaggcttattgagtagggtgaagccaccatgactctggccattaggtgccatgaatcctcccctcccccacatcactgtgacaatagaaagccccctcccccggaactgtacactgtctcctggggactcttgataagaagagtgcgcacactcctgagtcacccttcagctcacatgagaagaaactgatctgcctggcggccgaagctgagccttaccctcaagccctgtagcccttgtgtcagacacgacgtgaggtagggatcgctccagactctgctgtgtttctgcagacacgggatgtcagtcaagctggtcactcctcaaagacaatggcagcttaaagtgccaagaatgtggatttttttgctatggttgacacctggggagctgagctattcccacccaacagtgggactcttcccttggctgcatgtccagccacacggtcagtctctcgaggaagcctctcgccacattcatcccctgcagttccccgtcttcctgtacctcggtcccagctctctggttgcagatgagggggtgggtagggagtggccaacagctgggctgctgggcagacccagtgaagccagcccctcccccaggctataaagagctagctagtgcccacgtcccaaaaggaacgtgtgatttcttagggaggattgcaggggtgggagttccactaacacaacagtaaaaagtaaagttcttcatgccaagagggctttagcatttatttaaattcccaaacattattccttcactctggggccacctgatggatgttccagtcagccataaagagcataagtgacccctctcccaggaatctagccaattttgctctctttaatagggaagaaagtgagggttgtaaatgtcaagtagccgattgtgtggcaacatcaaccgaaccccgcattcatgagcaaacgtaccactttcctaacagaggtctggggaggttttgttcactttaattgctgggttctgggggaaacttgagatgttctgtccatgtgaggtgttggcgtgggtttgactaattcccactccagcgattttggagattcgagtgtgagatctgctcatgagtgtgtgtgtgtgtgtgtgtgtgtgtgtgtgtgtctgtgtgtctgtgcatgtatgcattgaaggccttgcagagcctagttatgcagattctgtttgtggtccccaaatgggctttgtgtgtgtgtgtgtgtgtgtgtgtgtgtgtgccttcaacttagaaagttcaccatcaactgagataataaatgtagataccccagggaaagaccaggtggaaactagccaaggactgcttgccagcctgatgccactcccactgaattctgggaagatgcacagctgcatcctggagctccctgagacatctaagaagatgctaccattcagttctccttagccaccactggctgtcaaaatgcctgcctgccaaacacctggcccaagatatggccctgccaaatgccagcaggtgacctttgaaagaaccaactctttcaactacaaatctagccacgtctgtgacagctggcagatccacaatacaagatgaacccccatcctgtggccatgctctcctgtccctacaccaaggtggagggtctagcacatgcctgatgtatggaggagttggggcttgatgttaggagatgtatttcattctcgttctctctgtgtgtttctctctccctcccccttgtgtgtctgtgtctgtctctctctctgtctctctgtgtctctctctgtctgtctgtctctctatgtgtatctgtcccacactctgtctctctatgtctctctattatctctgtctccctgtttgtctctgtgcctctctctctctcattcatcttctctccccccccccccccgccccgggtaggtacattcattctgcatgtctattttcctggattccctttctctcttaatctgtttggacctcccttgggagccagtcatcctgaatcatttgccactggtagagctactaaggcacagattatgaaaggaaactggagacttaagcaggttcaggttaggccacagacaaccttagacacctccatagtatgcttgagctgaggtcatagtaattggtccattcagcagccccaagactcagctttgggccaccagatggcatgactttgaggaccataaggtgtgtgtttctctggaattcttaggattttgtggctctgtcacctccatccgaagaactacatcgtgttagtgaaaatgcatccaaaagataagccgattggttatggcatttattgttaattgaatttgctcagaaatggcagctgaaagattgttaatgttcacaaatttacatcaagttaaacatctgtccctcttaagctaaagtcgcggtgccttgtgaattagatctgggagcaaaatgcttcttgctctttgcacagcttagcagtttcaaaatagacctcagaatgacacatggtaaccaaggctgggatagcacagccacttgggtgggaatgttggcgccagacgcttacacaaaatttctgctttagtggtaaagatcacagaactgttaaggcaaaatgtggcagtcgggatgcgggagcaagggtggtaattttggagggagaggaaactgcctcgagcaaacataaggatggagtcccatcctgtctctgaagacctctctgggggtgcagccaggtgccgtgctgagaccctaagctctagttacaggccaccctgccagattaaagacagctgtattccagtcggtgtggcccctgtgtggttactgaagcaatggtctatatactgctcgggaaaagtgctctgtaagcccaagggcccctttagcatagcccactgaaccctaccgcagcccttcccttccccctctccctctgtgttatttatgttcctcactgctgagacaaaataccggacaagaagtgacttaagggagaggagtgtattttggtcacagtttgagggtacagcccatctcagcaagaatgtgagctatataatcattagtgtcccccagtcagctaaccccaagcaagatcaccccctcccacagtgagtcacctcctccactgaggccccatctcttagggatccacagtctcccaagcagcagcaacacctgagaaacaatagtacaaacctgggcggctatgaaggatgtctgaggttcagcctacaccaccctccccttagctctctccacccctgttcatgaaagaaaagctactgtagcatgatgctggatggcctaagtcctgtgtcctctctccaggatggtggttaagaccatctgaatccagggctgaccagtgagggacaagacagacaaagggaactatctccagctggaacccatcagggctggggtcttcatagctaccttgaggtcccccaaagccactgaaacctcaaaaatttatctgcctgtgtataaatttcttcccaggctcatagtgtctctggactaatatcctacacatttgctgtgcagaacccaggaaagggaagaggtttttcctaaggctattcatagctgagtgtaccctcaaaccttcaaaaaaaggtctatctggagccaccctgggtagaagagggaagacattttcatatgctttctctcccaggctcttttcagggaaccaccttgtgcccagcagaagagatccttctatataggctagtgtccaagcttcctgtggctggccactctcaacccaccccagaatagccatctttgagttcactctgtagggccagcaatgaaggctttgaggtgtcccctaggtgaggtaagtttggttgtccatgaaaaaacaacaagccacacacacaggagtcatccctttgcatccacactgcattcagggagctgacatgatgaaggactgggcccacaatctttagatttccacccttcccctaccgtatgacacatccatgcccctctgcctcccttccccacagaggagactgtggtggtaaagttaacagatgtttaaacctaattcccaggtgcaggtggtaggccaggtgctgggctggcacccacaaaccaggccagcggggaactaatggcggccgctggttagcagaggatgtataagcactgaatggacggctgggaaagggccgtgatggagatgaggggcagcaagaaaggaacctggttagacagagcagagtatggtggagaaggaggtgggagggggctcactgagggcctgagggaaaacagcttcagtgagtaaggaagaggcagcatcacacacacacacacaccacacactcacatgcatgtaggcacacacacatgcacacactcacaggcatatattatacacacacacacacacacacacacatgcatgcacacacacacaaacacactcacacacatattaatattactcacatgcatgtacacatgtcacacatatcacgtgtacacatcacatatgaacacatacatacacacatatacatatcacacttgagcaacatgcacacatatgaacacacacatgcacacacatacatcacacactcatgcatgcatacactcatgtgtgcacacacatgcatcacatatttacatgcatgcatgtacacatctcacatgcacaattctcaccatattcgtgcatgcactcttagaacatgggcttcttgctgtctgtctgcctcacccatttcttaccttcttgtcctccccttgaccctcaggaatccacccacccttcccacccccagaaatggaacttcacctgccagggaatggagacggttcctttgagacacagtctggcagaggccacaaggctgatggaatattcacagttcctcccctgcttccctttgtctcgaagtagcaagtatccctctgatggacacttaattctggaggcaactcctgcttcctctccctctgctcaaaatattaaatgcgactcagtctgcgctcctgctatgatcatctccctcagcgcagagggagcggggccagaatgggaacactttagaatcttcaaagagggacaattattgagggagccagattaatgaggtgtcatgacaacttagccagatctgcaactgacctttctcatggagaatgggcttgataaatgcagttcattaccaagttctgacaggaaaatagggacacactctgggctcctcagtctgctgatcaatattttatctaccaaagaaagcctggtctagatgcaggaggagcctggaactaaccggacaacctctgctgtgtgagggaccctaagcccgacaggaagtggcttaggaccactgagaggtcccagagtagaaatggccctgggtagaggaagggaggggggaaatatccaagatggcttcctcattccgtgagtctatatgcatagggttatttgtcagttatctcagagaaggagacaaaaatgaatgagctgcatccctcctcactgggggaaacctgccagtgtcattaaaaggacacctcaggcctgggtggccatatgcactagtaaagtcctgttgttatatcatgatgctctaagatgttcaaggcctaggtgggcccccctcccccaccctgctcccatcaagcttaggtggtcctcaggttctctaggcagtgctcacaagcgatgttggtgttggctacattagcttcttctcttactgctgagacaacattgacttaaggaaggacaacgtggtttaggctcacagtctgaaggtatgtccatcatggtatggaaggcacatggacaggagcatgggtgacctgtcacatggtatccacattgcagagaccagtgaatgctgttactcccctgactttctccttttttttttttcctttttatttagtccccagcccatgggatggtgctacccccattcagagtttaactctttggaaactcccatatgtccccaggaagtatgtctcctaagtgattccaaatcctgtcagtttgacaatgatgatgaggcatcctacaagccaagttcagcagcctgtgacatttatgttctgaggttctgaagtatgtgtgtgagtgtgtgatgtgtgagtgcgtgtttaatgtgtgagtgtatatgcattgccccaggctggcccagaaagccttggcaatggactggaaaagggtgtgtaataaatacccaagcctctaaccctccaggatccttaccctgaaaggagccagtggactgaatcccaggctagtactggaccctgagccctgatccaaagacatcacatgcccttccttccagaatcctaggcagaggctggcatagcctctggtcaactatgttgacatcagatgcagagagtaggtaaatatagatgactgattttatttatcttgttctgttttaattctcacttttcgaatatgatctctcactccatatcccttgctggcaagaaactgtataactgaggctggtctcaaactttcagtgatccttctactcctgactcctgggtgctgggattcgctcccctgtcttgactctatttgctcatccacgtgctcacctgtgtatctcttcgattggcacaccatccttttatcgtgtggacatcaggggacagctctgaggattccctttctctctttccacctttccgtggctcccagagatgggactcaggctggcatgtgataactagtttggaaacagagtttggaacctcgggtagacaggtctggcagatgcaagaatgtgtgtgtggccctggggtagttgaaccactcctgactgtccccaggaaaggggacattgtgaagtacacactcctctgaaacagccatcgtggggtcagggaggagagctcatcctgcgactgaactgcaaggctggcacatagcatgggatggtgacacagagccaccaggaaggcgtgtttgcagaagcatcaagtgtgtccctaggaagagagggtaaaccacagacactaaagagatggcctccatgggtgaataaacccctacacctgggtggctttcactgctatgtcctcagatctttccaacgagtggggctgggggtgggactagaagagttcagttgactctgagcagatgacgtaatggtttgagtctaggtggacttctccatgccgctcatttgaaatatggctgctctgcgtgacaaagagagatgtaagactctctgccagaaacagggagtaactcaatagtcgcatacttacctagtgctcacaacaccctgggttcagttccctagcactgcagaggactggtggacaggtgggacagatcctcaggaagggacagacagacaagagttgggaacatcaggttgctgtgtctggctcccacaccagcctgtggcctctctgtccttctgagatggaccgcctgccctctcctgccttaatggtgtccatggacccgtgagtgactctttctagctccactggcctccagatgctcgctgtgtacactgtacaccatacactgtacaccatgccttccccactgcctcctgccatagcatagctcacacacagcgggtctgagcctctgctccactccccctccctaatggatctcctactccttaaggcactcttaaagccttagaacgcccacatagagtgtcagtacatactgctacacagatgggagcaacacagcctaggcagtgcaggacactgaccctaaagactcaggttactcaactgggcccccagcttggcttctagacacaggataaaaacctctgagtcctcagaacaacagtatagaattttttttttttgagacatggtctcatataacccagactagactcaaacttgctctttagctggaaatgaccttgagcttctgatccccctgcctccacctcaggattttcagggtaacaggcatggaccataactcccagttttatgcagttcgggcaattgaacccagagttccctgcaggctagccaagcactcaaccaatcaagttgcatccacagcctaaagtgcttcaggatttggtaggagagcagagcctgagaagttatcacagccccctctcttacagcccccaccaagcccacctcagcaggaccacatcatggtctccccagcagccatggggaggttgtctagctattgcacagggcatcaggcagcaccaagaacctgtgggaagaatgggggaccagtaaacctaagaccacactccccatctgatctgccctatctaaccttctggtggccctggtgtcacgggttctcagaatgctcatctctgaccagcatatctgagggaagccttctattaataccacattagtcactctagacaccagcttcccagtctgtagtgcaggtgcctgtccccagggaaacgacagtgcctccagtttatgcacagtatccacgtgaatgaacatttccaccagtgcccaccccagcagataccctcctactctcactctgcccaccccattcctgctccctttgccagcaccagactttaccctctttggtaaggtgatagactgactcaggtaagaccatgctctttccccaaaacatagttttttgagagagagagagagagagagagagagagagagagagagagagagagagagagagagaagagagagagagagagagagagagagagagagagagagagagagagagatccactccaccagacacattcttccagcgatattggctttgccatgagaccatgctcagtatggaggccagagctatgaagatctaaaaatggggtacatcagcttatgggtcctgggagctctccaaaatggatcacctgccaggcacaagagggatgtgagcaggtcaggggagatgggagggagccccaccgcctaagcatggtgactcccagggagcaaatagatttgattatattgaacactgcaattgatttttttcttctaaataaacacacaaaggaaatagtaatgggcgtttgtttctgacaagaatcaattgaccccaaattggaagaaaatctagaaacacaaacaagtgcaggaaagggtatctgggcttctccaatgagagagggagggcaggagagaaaaacagctcttcacgtgcatccctgctctcccgtggatccctgctctccccgttgaggttccaacaactgaaagtgggagagtagctatcaatcactgagccttggctcagagtaaagatgtgtgtgaccatattaattaaccatcatgatatccccgctgtgggatgcagtattatcccatctctcagatgaaatcactgaggcctgtgttaaactttcccaggttacacaacctggaaacagcagagttgggactcacaaagccaggagttcccaaactcaaacctgttcactatccggctggccctgagagcttaacctggcaccttcaactggcgttagaattcaagggaagagaccctaaccccagacagtccagacctagcaccccttgatcttctctaaagaatggagggtgggggagcccacatcagcattccccagtctcaacaaagccaggcccaggaactgtttgtatcccctggctggatggggaggcagagctggaggagcactgctctgtgacatccctgcggccccctatttactggctgcgctctgtatggtggccccgtcaccagcaagataaaccatgccatgtcacagtgcatcacaggcctcatttgccaaagaaccatgcaatgtcgacgcgttcagcgagcacagccgtgataaaaggcctaagactaatgggctgtgtgctcggtttagtctcctaaagcttccttttgtctcttggtcgtggacttgtgtacacatgtttgttttcaagtaacccagctctgggagtgtacctaattaccgtaagcagggattattagccctgttaactaaaactccctaatctatgaggccaagcattcaaaagcagcctttaaaataggattaagacaaaaggcagactgtgacagagtagaattggggctggctttcctcgaaccatgagataacagctgcagactccactggaagaattttccagactccctctggttcatttagtattggtatatgatatctggcttaaatatcagtaggctgggtgatggggcagatggacacgtgaaccctgctctatgatggtgacactgtttagtgcacactggaaatgtcccaacaattgtttgcaactgagagagataaactgactgacgggcagaacattctttccagcccccagggtgcacctgacgtaacagctgtcttctcttttacaggagacatgtgcaccatggctggctatgctcgtctcaaaaatgtcctcctggcactccagagccgcagacagccgctcccacaaggaacccccaggcaaagcctcgcctcccagaagcgcctcttggtggagtcactgtttaaggacttggatgccgacggcaatgggcacctcggcagcttggagctggctcaggtgggtgtggcattcaggtggagcccgaggagatatcctgcgtgcgtgcatggtgaaggatcacacaagctccgtggtgggaaaggttgtttataattgtctctgtcaccagttgccaaggggaccctctcccccacccttcctaggactcacagcttgtcagcgcctctgagaatgtcttacacacagaattctgtctcctgccacctgccacctcagcccaggtttacaagcggttttgatgctttcttggcttcggggaaagcctccctcaaaggggctgcccactggtgttttccttagaaaactagtctttggtgctttgagcctgtcattttctacagaaggaatgtcaaagaagaacagtacttgcagcagcgagcatctttggcactccagtctgggggtccccaaggcctctgcccagtgacagttctctctagcatccaaatgtcaatgacccaaccccctgactgttttgcttgtgggaagccctgtgtccacccagcaaaggcactagtctaagaatgcccagggtggacaaatacagccttttctgtaggacagcagccaagaatacagggttcaaagctaatcatgagctagtgagtctctggaggcccctcactcctaagctgcgatttctcagccgtgaacctcatcgcctcagggtcgtcatgggaatttatggtgctaaaacatgtaagacatgtgacacgtttaacattatacttggcacataggatgttctcagtggtcatcaatgggcagcagcagcagcaacatcaccaccaccaccatcatcatcatcgtcgtcatcgtcgcccccccctttatccttcagcatcctctcttgtaaggtcagaactgctactatcccattttacagatgcttttaggtgaggaatctgtgactctagggtatcgagtaaccagtgtctctgtcccactcaccacacaaacccaagcatcctaggcctgttgcccacagatggcatggtgtcatcgggccagcaaacccctactctatcagtgctagtcatccctcagctctagctgagaccccaaagggcatggctaggagctctcatttgacaagaatggctctgagaaagtccagaggccttgctaattatgattgcctgccaggaacacaccccatctgttattcctcataccacgacctgagcaggaagcccagggcaagtgacatcagcctgccctgggtagaggcagctgtgagcacctggttcccaagcccgagtggctcccaacagatcttcttgggctcgttgctctaacctggcagagacgtagccagaggcacttgaagccattaacaagcatggtaattggactgtgatttcctctttaaaatttaatatatttaaagtctgtctcataaatccgccgagcagaacccagctaatgtgggccttgccttgacactgagtcagaggcaccggagggaagaactcgttggtcctatgaaaagttaatcaatttccaatgtagaaatagacaaagggaaatttccgtcttcgagagattgatccgaggcgtcatggttgatctccttcttatcgaacaccctcacttctgggtgaagggtcatttttttaacattatcacattaaattgcctttaatatagcaaaccaaactgggaatgttaaacaaaggaaaaaatgcctctacctccacccctccaaaataaaataaaatcatttcctctctcttgattttctttgtagcaatctcccttgagcctctgtgtgttttcggttaaaccatcaccacagaggaatccacaggaatccaccaatagctcctaaataggaccctgactgaggggtgacattggtggccctggaaagacaattataggcagaggaggctcaggttttcctgtgacataaacataaaatgtccccatgttctcatgtggctggatgcatgctcccagctaatggtactgtttgggaagattgttggatcttaaggaaatggagtcttggtggaggaagtgggcctgggagtgggcttaggcttgtagcctgaccccatcttcccttcagcctgtgtttcctgagtggagatgtaacctgacagccagcatcctgctctgccacctgatagctctgccaccactccctctctgccactgccatgtcttccatgattcgatggcactctgtccccagaactgtaaaaaccccttctccctttaagttgcttttgttggggtcttttatcacagcaacagaaacatgagacagatctggtcagcagctgctttctggacgtgtgctgtggagagtcaactctctaacagtggtgagggttggtgtgtggttgacgggagtgaatacagagatgggatgtgtggtgtgttctttttctcatcgctatgatctgaacctatcaagaagccacttaagagagaagagtttgtttctggcttgccgtttgagggaacacagtctatcgtggtgagaaaatgtggtcacacaagcatgaggccgctggtcaccccgcgccatccactagaaagcagaggcagatgagtgccagtgtttggcaggtttcgcagttctgcagtttctttctccctattattcggtctgagtacccagcccatgtttagggtgggtcttctttcctcagttaaagctctctggcgtgtttgaggtaattccaactctggtcaagttgacaatggaaattaagcatcacaaatagtgacctgggttccctccctgattcagctgttagctggtttctcatgatcaggccctccattagcagaagtgatagacaagaagccccaagggaatgccaggaccagggataggagtgggtgggttggggagcagggggagggggagggggtaggggattttcagaggggaaactaggagaggggataacatttgaaatgtaaataaagaaaatatataataataataagccccaaagatttttcctcacttagatagcctgggtctgtctgacagtcagggagaccacagaccgaccacaggcccttccttccctctctgagcctctgtttccttatctataaaatgagggattcaaaccagacaagaccagagattaagtactccccaatgcctcaacctgcaaggctttaggattgccctgagtagggcattgagggaaggaagaaaggccaggcatatagatacacaaaaaggctggggttggctgggtaattcactctcatgaagatgcaccaggagcagcctagaaacccagcttattttgtacatctgaactgagaaggcaagtccatcctatacggctagtcgggatgggggtttctgtaggggaacagttcaggctgcagccctccaggaaaaggaggctgggcctatattgtccatacactgtcagcatctgcacacagacccaggggaggctttgctatatccatgaaccttacctaggaagggctctgctattcccatgggtctgaggcattgatgtgccaatgcccgtgtcaacagaacacattcgctcagcttcatccatccgctcccacaccctgagtccccgctagatctggggcatttcccagcaacattcatgatcccgagctcactggtgactctggctttgtctcttctcgcctcacagtatgtgctaaaggagcaggacatggacggttcactgaacagatgctcacccagcgacctcctgcgatttgatgactataatagcgatggctccttgacccttggagagttctacacagccttccgtaagtgagacctctgcccagggctgcgagcatgggaactaagttcctcaggtatccgccctgtcctgtggtgctgatgtggcatcaggagcctgaatgttgggtacttgggacgtgtgagcctggcctcagccatcttccaagtggatttggcttaaatatgaaagaagttgaaactggtctgtacaagcctgagttatgagaaaaagggcaaaaggagatgtgtggaaaggagaggactcgccaacccgctgccttttgcataaaagtatcctcactgatgaagggattcaggggcataacaagagcagggctgtgacaatcatcctctgaccttactcgtgtgattttttctggagaggcatgaagaaatgtttatctacctcagctctggcatcagtgacagaccacagaaatgactccatccaagttcagcttagtgaaccggggagttattggaattacttaaaggagcctggacgaccccaaggtgccagtaccgctgaaaagccaaagatcacaggcaataattcacctgtaggacttgaaggcaggtgggcttgtcagagtctcttctgtcctgcaatttctgttacttatataaattgggcacagggggtgtcttgtgagtcatttaagtttcaggagcttcctggacttgttttatttacttcctgagtcataaccttccctccttcctctaggaggggaatatacagcaatgaacacagaggcagcccagctccactgggtagcctggcttggagagaaacttgaaagatgccagaggcaaggccaggcagaagctgagaccagtcactacccaaatacttctgctggggttgggtagggcctctcaacccttcctaatgagcaattctcaggaaaacattcattaattaacaagttgttatagcctctagctattgcttaaagaggcccggccttgatcagaactgtgccatagggttggagaaaggaaaagtgttcaacacaagttctcaacacagaggagattcatttgccccctagggacagagggcagggataagagaaaaggcaggagataaaggatgagggagaagagggagggaataagggagaagaaggaggcatatttgtcctggtggacaagggacagcctctggatagagaggagacagatgtggcccacaggtcaatggtggtttataaaggaaaagagggaaccccgtgttaggatgaggtatttaattttgattgggcatgttaattaggtgagccaaaagggacttttgatttctggacttcaatactttgatggtcggggctttgtggttagcatcaggatgaggaagtgatcaagtaagagaataggccttgtgagtagctttagggatggaatctaatggtttttaataaggcagagggaatgggagagaagggccagagacatgtccaccacacttgagctggccagagtcccttcatttaggcaatgtcatgatcttgtgaccatcttaggaggtctttatcctcacccccccaaaggagatttttcccggaactaagcgggttttacagaagccgaaattcagtttctagttaagacagtttgatcttcagcaaacaggacttgctgtctaagcggatattggaggtggtcacttctcaagggagaagagcaatgcacacagctttcaggaagtggacgcagtgggcaggtttacaggagtaaaagccgtaggtcagtgttagccctggggtctcaggtgagagacggcttcttcctccagtgcaactgcatttcctacatcaacttgctaaccataatgttaacgcttgctatctccctgtgtgaaaacagaaggggtgctctgagtggcttcttcttggggttccctggtgtgtgccacacttggagatgacctgcttagagattccatcaagctaactctaggagtacttgttgccgtgagcgctaacctcagtggattgacactgagcggaagctggctagcgtgctgggcccacactagatacaagaagaacatgctttgtcctaaatggaagaagccccttagtattcaaggttacttgggtctgcttagagcaggtggtgtgagagcctggtgttatacttgtgggtgtgacctgcaagctcccagcacctgatggtcagccttggggaggcagtgtaagctgaagatacctaagccacaccctcagccacagaatttaggatccttccccctagcattcatctagaattccatcgctccgagaaggtatccctaaaaaatagcaacattctttgagctctgtctattcccaagaggcagctcttctgttcggatggcaaaggggcatgtgtggctgatagaagaaacacttgaaggacataaaagagaacagcaaatgatttttccagcagtaattaattgtccatgtgcatgatgtggttctgtgaagaaagagaaggtgttccggctcacagcatctttagtatccagggttacatccaactaccattgcaaggctttgattgatgtaccatgaccaaccatgtttggtctcttgcatcctcatccgtgccaactaggaaaaccaaaacctgaatctgctgatactggttcatgatgaagcgtgaatgacttgtaggctcgtcctgttgctagaagtacctgtttggagcatcaagagcttattccccaaaataattcttgaaatttaaaaatgtttagggagttgactattaaatagtcagggatttttgtaaacatacagttgagtggtcagtggctttaaatccacacctcagatatccataattcataaaggctacccagaatggagaaagttattgttgtcattgtcatcatcatcatcattattattattcagtgagacgcatgccaagtgttagacctgaccatcactagagagaccttccctgttgactccagtgcttggctcatcactagcatcccacccacttcccttgataatactagtccctcagaacttagatggactggggacccagcatcagaagggcccacagccagatttattctccaagtcaggaggtagcccattttccaggaacagccacgatacattccagggaagctgccaaaactccaactcctctgcaaagggtctagatcactttgtggcatgcctgtggcatggaaggaggaagtttctagattaggttagttaagctgggaagacctaccctacttgtgaacagaaccatcccacaggctggggtcctagactgcttgaaaaagggaaggcaagccgggcactagagttcctctctttgcttcctgactgtgggtttaatataaccagctgcctcttagtcctattactgtgacctccccgccatgatgactgtgatcccctcaaactgtgagccaaattaaacccttccttccttaagatgcttgtcacagcagtaattaattaattatttggctgacaatgccacttccttgatcctgagaatggatctggagccaacctgcaagctcttggctttgctccggaggaaatgcaagcatctctcccacctgtgaagacagacagatagtttccttaatgaaggtcaattataaacatgagccactaaagggaaggggcacattatcccctcagcgccaaccataggtttcagacagggtaccctaatgtctgcttctcccattcctgggttattatttgaaaagctttagaatcatcattcttgaagcaaattagattctgcggttgccttggacttgttttgagccaggcagccaaaccattcatcacagcccaacccaaataatagatatgcaataaaatgtaaacttgcagccattgaggaagccacaaaatgagttaacccagctataaagacctgacatgctgcggctctgagcacccagggatcaatagcttctcaaagttataggaactcctaattcccagagctgtagtgatggatgtatggctgggcgagttttaaatgagtaattaaaatgagacatacaggtggaactgattccctagaaagcagtgggcactcgagaaatctcactgaaggccagctggatcttgcacatctcagcaacaacattttgaatttaattttaacagcttgatgggcagggagaagttgagtgtttggggcttccttttctagcttctgttttgtgagttttgttcttgggctccaggaaaggtagaggctgcagggagactccagccccacagccttctgaagccaactcagaagctcttctgaggatgacagggctggtctgagagtggtggtgcacacctttaattccagcacttgaggcaaaagcagggagaactctgagctccagaccatccaggactagctacatagtgagactctgtctcaatcaattaatcaatcaatcgaatgaaaagatgatggctctgggtgtttggtctacagaaatgacatgtattgataagtttggggtggggatggagagggaggctgctaaagcttaccttccagtgcagccattttggcctcactgagctagtttgccccacacagcctgttacaggctatggcatggggttccatggccaccagctaccctgctaactgattcatggtgaggtcccatctcattcctgactttaggaagtaggtaaatgccacactctaggaagaggacacaggaggtatgttagccatgacaaccaattctctgtctctttgtgactctctctgtgtgtatgtgtgtgtgtgtgtgtgtgtgtgtgtgtgtgtgtgtgtctgtgtatacatgaaggtgtgtggaggctagagaacaacctcagacagagtttcttggacactgtccaccttggtttttgaagacagcctctccctggcttggaacacatcaagcagtcaaggctggctgaccaaccagctccagggatctgcccatctctgcctcccctgtaccagagtgggattacaaccatgtgccaccaggctgagctataaaggtagggacgtttaagatcaaacttgggtccccatgcttgcaaagcaagcgctctaccaactgagctatctcctctgcccctgcatccatctctttctgaccatcaggctgagctaagactcccaacccggttagccatcccatacggtgacaagcatgaaagatgaaggtggcctccctgtctcactccatctatcaactaaaccttgttttcaggttgcatttgacatcccagatcaaagtcaggtctaggaactaaaggctgcagtgtcctctctgcacgtgtcctccgcctccctcccctcctcccccacagccacctgtccctgctgtggcagagacccaggctccagggctactggaaagcaggttgcaagctagtcctcactgttcatcacagtcaattaacttaaaagtcgctcacctaaaaaaaaaaaagcttctcagttccgcatgtttttacacttttctgaatgttcaagttgggatcgtgggggaaaagcaggtcacttaagtgagaactatttttttcccctctctttaaattcattatcagtgtctcctacttttttagaaagatacttgtccgcttaattaatcctctgagggcaagcccagcaaacatgtggattgggggtggggggaagcaggttttaagcagccacatgagcttcacgtggtaacattccaggtcaccagggaccccaaggtgctgacagggtgggaatcagacccaagcctccctctggaacttgggggccctaggcatacagaaaaggaaaagaaaactttgatctccttacggcctggctcttgtaaccaagcgattctgaatcagacggactaggacgttgcacatggttttccatcatctttgctacaaagtgggagggaggctgagtccggctgtgcacatcttatcccctggaaccaataatggctgccaccatcctaggcttccataccaacctcctcagactcctcatcaccaaggtggtgaaataagacagccacaaacgtccaaccagctctctccggctggttaaccacaaagggtgggcttgactgcaattgtaggcggatattgcttcatccttgacatttagccctaggttttgagcagtgaggccaggctagaggatgggttcagagccagcacaccaccctcactcagggtctgtgtttgatcagttatcactgtagataatgggctcttacagtcagagagacacctagtgttcaacatgagccagcactgtgtgctgtatcgctttctcagctaaagaaagaaactcagtgaagttcaagtatccaacctgaggtcacaccaccagcaagtcacagaactgggatggcccatgcacatgattctacaaccttctcgtgtatttaaacattcttggcattcccctctgcattctccagggagaagcatgctgtcccccacacttcaaggtgatcccaatagactcctcctccaagaaatctttctcatgccccctcacatgggccaagccctacaccccattatctgggagcccagagactgccctgggcttgcctctgcttctcttcctcctcctctcctctccttcctcctcctctgtccaccttgaagtctcaaaaccacactgcctctttctcatctcagtggtttcctcctaaggactgtaactgcattgtgaggctcaacgttttctgccattgtctggaactcagtccttccttttttaaagatcccagctggaagctctcaatggcctcagtgcagagcaactgaatagtagaaaattaactaattacaggttcttattgaaaatctattatacacaaattgcaaaaaaaaaaaaaaaccacctcattaaaatatgatgctttggtgtgtttttttaaaacttactcttggagggaggggcagggttgggtgaatagacacttctaccatcattctcctggagctgcagagccacttcatgttcatgggttcacacagcccagcctgactttgtatatcatagagaaactaaaaattctgcacagagctctctgaatattagtaaatactttaaagtggctgcagaggaggcaaaagatttggttacagagatataaatgagaacaattgaaatgtcagccttttacaggatagcgccgtattgccatcatgaatctcactgtttctgcaaagcttttgtcggaacttgaatgcgcaattcagcaccgaaggtcatacttctgatttccaagcttgctcccctaaatggtagtgttggggaggcttgggatatgcaagccagagctatccaaagcctatatctcagtgaggatccttgtatgcccaaggttgcctccaaggctccaagcaaaagcccagaggtaaaacttataacacagagtgaaacccccagcaccctacttgattgtttggtctgcccttggacccctgatttcttgtgggtgtggctggcagggagtgtgaggcacctggtgatgaccagatgctctgaagtatgaggaagcacacctgaaaggcaattatggtttggatgtggaatgtcccccacgggtgcatgcaccaacactctgtctccacctggtggcactgtttcaggaaactgaagaacttttcagaagtgggacctagatggaggaggtggtttgctgggagtgggggtggtcttaagttttatgatccagctcaacttcctgtcctgtcttcctgacccactcagagtacacccttacatactgctgctgctgtgctatccctgcctggataaaccacaccatcaaacataagcccaagtcattgcttctcttaggctgccccttgtcaggagttgagccatagcagtgagaaagtaatggatacaaaagtgggcctcccaaggctggacacttgacacagccatgattctacagtcttggtctttctttctttctttctttctttctttctttctttctttctttctttctttttcctaccacatcctttcagattgcaatcgctctcaagaccctacagctactactatgaggcttagtctgtggtctgcagaatgcatgtgtcctaaggttatggaggtggggtcagaggaagccatgacaggatacatgtatggcatgacaggatacaatcactaagtgaacatcttatgggtcatactcaattggccccaatagcatggttacccattgtaagagcaggctgaagggaccaaggggaccaagaagctctgagtagagagagaggcatccaatgcctctgctgctacttagacaccaggtaaggaggatttcagaccccagactgccagatgctacctcatcttaaattgctcatacatcagccccttcttatcatggttctcaccgggcgtcactccatccctagaggccaaggtggcttctggctaccccagaacttagcctttacttggagcctccatctgggcccaaagttgagacaggaagaatggtgggtggttggaatattgacagagactataggactaaaaactatcctcagagatggcagcagaggggagaagacatagaatggctgggcaaagagaaagaagggcaagagtgttattgtcctgagtacctgtcacggttagaaaggaaagccacggaactgggggagaaacctggagcttttcatgtggtagacattcagcccggtagcagcagggactcattaaaatgactggaggccatattggaaaataaatatctatgtgaatatataagaaaatgtcagagtggtatgaccgtttccaaagataatagtcaaggtgtttccctgtcccccacacaatattagctgtgttagttgtccaccatgctccatggagtagtctcggagctcaatagctgggctggcaaagaggtcccatcccctgtatataatctaagttacctctcggtccagctggccttctgtcatgtccctgttccgtgctgccctcatagaactcttttagaagctggcctgagttgtctgcatgactgggcacctgaccagtcctgtcacgtgtctcccagaggctcctttgaagctccctgatgaagctcaaggccaagaagctggcggtgcactctgcagtgacatgagtagacccatatctcagctaatttccgtgtgtgcaggacctataaggtcagaggtcatggccactataacagttggtctttctggctatttgtactcttgtggatacaggatcacagcaaatggtcagataaataagccaatgaatggagctctctagtgatggagaagcaggtattctgactatgtgaagggaggccgacctactaagcatcatatactctgattccagcttacccagatataaacaggaaaagctctagtctgccctgaatcccccatgagtcccacctagagtgaggacagccagacagtctgactgctaccaccaagagaatgatagtactctttagctcagaatactaagcaatggctttctgttccaagctacagcttgatcttggctccttagccgcagtcctgctggctttgcctccttttcctggtaggagctacccccaggaaggtgtggagcagctggcatgtggagccttggagagcagtctcagatggcatgagtagtttgtcttcagaaagggttttaggttggagcaactgctcatggtttgttgggaagttgcccacagctagggatggacccagggctccattcctagtccaagtaggtgaatgagtagggtgcctgaaatgtactgagcccccactgtcccctatctgcatggcacatccagcttacagccttccagaacactttggaaacttcccaggtagagctgactctccagagccaccataggccacccacaggccccccagagcacaaagatgccggaggctacagagttccacccaaagccaggtcgccccagatctatccacaacagggcctgcaatgaagcattgggggagcttcacccctgctctagccaggaccctctagggtcttctctttctacccctacagtgtgtgtagagcaaacacattccagccacagactaatgcagagggtaggacctgggctatcacctgcatgctaaatcctgaaacaggtacctcacctgtcacctgcatctctcccagaccacatcacaaaagtaacagttactacttgtgggatggtcaattactgcacaaaatttcgtggttaatgggggaggggcattctggctccatagagaagctgaagccccaaagagcagcctcgttcagaagtgtcccccactctctcttgagttaccaggtctctgtaggatgtctgcctctgaaatccaagtggcatctcagctccccaaaaccagcacacttccagagactctgttggccctacccatctatataattggccctacccttcaaaggccgcttccacaggatggcactgaaggcacactggtatctgacaataggttcaagaggtagagacttggagacaaaggttacatccctgcctttgtgagtgctcagagcacccatccctcagcatccttcactgagatcttgatggcagctgacaatgagcttctctcaagaagctgagccctggcctggaggcagctgccataagccacactcgggctatactgctcacactcaggacctgagagagtatttaagggttgagttggcctatgactggctcagacagagtgaatgagatcggatcagctgggcaacaaagaactaaaggtcatataactcagcatcgagaaagcctctggtgctagcctagaactctgccagcctccggtccctgcagtcattgaatgaacagatgggcctggagtaggcacatcccatccctgtgggagtttagagtccccatgtcacatcatccagcaccagggtgcagaatgtatacaaggtaaagtagaccccccccccatcctgctggtgctagccagatgccatgcacatccctgccctccctgaggagccctgagacctgagaatactggcatgtgattatgaggccacgagtgaccggaacttcctcaagaagctttggattctgagtttggaaaagaagggaactgttgaatgtcttccagggaggctagggttaagaaagtgtaatgatccagagggggccttggactcggtaacagccctgaattattagtgagggttctctaagtgaacagtactgataggatgaaaaacattgtacacacacacacacacacacacacacacacacacacacatatgggctttattaaagcggcttttgggcttggtccaggcagtccagcaatggttgtctcccagtgaaaagagcaagatttaggtagtccacaggctaggcatcccagccatcccattctggtactaaaaccctagaggctccccagagaactgctggtcatcaatccatgtcggaatcctgaagaaaaaagaaggttctaacgtcagcaagaggatgggtgaagctgtttgtgagagtgcaggcaagcagggagaaagccaaagcttgcttctttcaagtctttttatgagggctgccatcggaaggtgtggcccagatttagggtgggtcttctcacctcaaatgagctcatcaagaaaatccctcccaggcatgtccagctgcttggtttttagttgattccagacatagtcaacttgccaaccaagattagccatcacaagccccatgcctccaacctaaatacgtgtctgccatagagggctacctgtcagagtgtgtcatgcagaggccaagtccagtccatccatcctgggtcctcccctccccttccctggcttctaaccaagggttgatggaatgcatcttccaaggcatgaggatgcagtggaagggattcgaaggccctgtagagcatccttgcaaggagagtagctcctatggaacgggagcagttggcatctgcttcaaccttgagaagggaaccaatgtgcttctactggaaacgccataaccataaaagaatggcctgagcaggacccctgagccccccccccaagtcaatcctctatccttcggaggctggatgttcacttcagagtgttcaggaccagactgtccacaacctcacctcacctgcctcccagccatggcttgggaaggatttggaaagaagtccacgtggaggggaagcagagatggcgtaggcctggggagaagggagagctcagagcagctgtgtagctgttgattaatagctgtgggccatggcagctttgagagggagggaggacctctcagttagtgggactaggagtgggcatgaggaatgtgtggctgtgtaggcccccttgtgagcctctgtactgtgtctgcatacctttgaagtcagaagagctgattgatcttgcctcgagtgaagggcagagacccagccccagctcatgatccctcgctcccagaccacaggctctgtgtaagcagccgtggccaggccgccaggcagatgaaatattaaagagcattggagtctaggaagtttgattctaaatgggttgtgtcagactggaccaactgagctaaagaacaacatctcagatgggcccttgccaactgtagtgtttgcaagaaaaatggcttccagatacccagagtgcaggcaacagttgcccaccattaaggaacggtatgatatcacaatggctgcagaccaagcctcagcagccccaactggcgcatggggatggtctcctggatgctagtctctgctcctaatcctcaggagagggtactggtgccaaacgttcttccagtgtgagtggccagataagcacctgtcactggtatctgcgggacagtaagtgcccagagtgaactgacatacactcagcaccatggcttcatgtaacttcactacaaaattcttcacacggtccttaaagtcatagaaccagcaaggcgggccggtgagctgcttcctgtgtgattgcaatgtaagggagtcctgttaaggtttgaacacttgatcaccagctggtggcgctgtttgaggaggttgtagaacttgaaggaagtgaggccaggttaggcgacaagcttcaaagaaaggctatggcccagccctgcttctagccccactttggatgtttctagatcatccagtcctgagctagcagccacatgttccctcagccaccagttgcttccaccaacttacctcccccactctggtgaattctgtcccttcagactgtgagcaggaagaggtctctgctccctgaagttgttttctgcccagtgtttggtcacagccatgagaaaagtaaacaacacatgccctgaatggaagcaatcggtgacatttgctgtcgtgtagccctgcatgccaagaagctgctccaggcaagctcagggcttagccctgagacaacagcggtgacatggtaagcccgtgcctgtccctatatctacaaattacctactgagggaaatggtccagggctcaaggtggggaagcccacccaggatggacatctgccatgtggtcagagcactgtgccagttcgcagtgcagagacatcacaactcagaagcccgagtgccgcagtgggttcacagcatgcagcagagctggcttctgaaagccacatcattaatttcaggtaataacccagcattaatagctgatgctaaacccgtctaggtgaattcattaatccttacaacactctatgaaggaggagctatcgttattcctctgcacagatgaagcccagaggccccatgcatttgataacttgcccattttccagacctagaaagctacaggacagggcttgaatccaggagcctggcttcaaagcccaaactcttgcccactctgctctgactctcaagtacctcaaacagctttggtcaccagcatgtgtttcacaaggacccttttggcacctcagatttggcagctgttgtctttgcaggtacctgtggcttgggaagggggatctattcagccaaaagatagactgttgatcccaactctacctgctccactcccagcatcccgtcccacagtggccagtccaacccagcacgtgcttctagaatctgtaaaggactagatcagagctttggggctaaatccatagagggccagaatcaacctgacaagctctttctggatctccatgtgtccggccttaggtatctatgggctgtgagtagatagttgcactgggggccagtcagacgcacaggattcattcacatacaggaagcaaagcacagggagatgtagctgataactaagccaaggcttttgttactacttaaaacacttattgcattagccaataaaatatagtacctcactttgtgacaatccttatgaaaggtacagcatgtagtcccagttaaagatggggaaactgaggcactgagcagttaaagaacctgcctgtggtcacccagatggaacccaaaagaccaaggacctagcagggatcatggtaatcccagagccccctccatatgtcttaggaagccacgtgccacccacaagtctacatgttggatgttctttctctatgcttccagcatcctgaagcttgtgtgtgccatcttctgcctgatttagtccatctttttattcattaatcaagggactgattcttcccctgactgtcggcgatgttgtaaaattcaattaataccctttagcaaaatgctttgagatcccacatgtgggatacgacacattagcgcagaattattttttggtgctactgtttgacatgaaataccatcccactgatgtctgaaaagagcctttttcaaggggctttgatggactgtgcccaccaaaaggtataggcactgggctggagtgatggcttagtagctaagaacatttcctatacttccagaggacctgagttcagttcagcacctatgttatgcaactcacagccacttatgactccagctccaggaggtctaacatctgcttctagcctttgcaagcaagtgagcatatacccacttatatcataacacacatacatacgagcgcacgcacgcacacacacacacacacactacacactatagtcagagatctcagaggggtcccctgtagaacccacagctaagctttcctgatttcccctttacaccctgagcccctggaatcagcagcaggtcacccacacaaatgttccctggcaggggatgtgtgggccctggaggttctgcagacctgggaacaaaaccccttatattggtgaaattttcactgtagtgaggctcctggacacacaccagcaagaacactaggatttggaacactggaggtgctctgagaacagcccagagggaaggcagggcaaggtgggtggtaggcagcaaaatttaaatatgatagatcagggatggtctcttccagaaaagtgcagctaagtcttgtgctaagagtttaggagagttggaagacaggaatgctagagggcctttctgaggttttaaagaatctgtaacagttggtcaggcaggaggtgcctttggtcaccagggcaacatgaagctccatttggttaagactaggtcccttcagctgggcgtggtggcgcatgcctttaatcccagcactcaggaggcagaggcaggcagatttctgagtttgaggccagcctggtctacagagtgagttccaggacagccagggctatacagacaaaccctgtctcgaaaaacctaaaaaaaaaaaaaaaaaaaaaaaaaaaaaaaactaggtcccttctctggaaaaaagggtgaggtctcgggatcccaagaagctggtctgaggaccatttttctcactagatggaacagaatctttgtggcagttttcctggggagacaaagacaaaaggtctattcaccctggataagaaagacattttgacactgtttaaagccataagattggacaaggccattgacctgataaaggtgggtaggtagagaacagccaagatcagggacgtggaagaagtcagaaaggtgaggaaatgccagcagccaaagacaatgcaaatcaaagaggaagcaatgtcctgggaacaagagaagagtggagcggctagctgggctggatggaagttggtctgaacagagcctaagagcctgcttttgctagtttgtagtctttgctactttaaggagcgtttcctccgtggagggatgttagaagtcaaaagtctcccatgagtttagggcagggttgctagggagccttcctgaggttttaaagaagtttgtaacagtcaggtaggattgtcataggcaaggatcttaaaggaaatgggcattcttcaggtgtccagagatgccaacatggccacttcaggcacgaggggccagagtcaggcctcaagaggacagagtgactgggctagcccatggcaatcctccagtccacagcctggtctcagagaggggcaaagaaaggacctattttaattttcttcttgggcttccacatgacaaaggagaaatatcacccaacattattatctctcagaaaatactctctggaaccataaagagggaaatacagcagagccagcccacgaaggttgcccctaaatcagcagcctctaaattaccacggtggtactctctaattcctgtggatgaaaacattaaaacgattttgacgcaaaggttttttttgtcggggttcccccgtttttcccttttttttccctttttttgttttagagagttccaacaggaggccgttctgccccccttttgggggggaaatcccttttggcccttggtgaacagagtccctgggctttcccctctactccccctcccacccaccccccagattttttttcctcttttcaccttgtaatgagatataaatcataacttgtgggggcaagctctagtatgcaagctgagagcatggattttctgaaaatgaaggtgtttggttaatgggaagtgtctcatccctgggtgggaacaggagtgtctcaagtagagtttgctattttaatgtcatacttctaaagtatattttattctcaggctggtctggctgtctgtggcatcactatgatgaatccgatgatctgatggcaccccagagactagcggctggctgcctggctcccccaaaggggactgctggactcaggttatacagaggcaaagacagaactcctagagcctgaccctgtaaggcaaggaggcacctctcagaaaagggcacagaagcaggatggagccctgctgcctgggtgctgcccgtgctggcctagctcactgtctcaattagggtttctattgctgtgagcagacaccatgacctcggccactcttataaggctggcttatggtttcagaggtttagtccattatcatcatggtggagggcatgtcagtatgcaggtagacatggtgctggggaaggagctgagagttctacctctggatcagcaggcagctggaagagaatcaggcacacttcctccaacaaggccacaccttttccaacaaggccacacacctcctaatagtgccactccctatggatttctgggaccatttttgtttgaactaccacacctagccaactaggtgcaaaagccccccatgggatccagagtctgttacatcccaggataggcaggagacaaggagtcacaggtcagagcagccgtactggcaaagtcccagatatgcagagctgttgctgtttctggggtaagaaacaggtaaaagggaaagaaactcagggttaggctaagcagtggtggagacagcaggacccccacagctgttctctcccgtcagcttctttcctctctatggctgtccatactctaggttcagctcctcaggtctgaatggagaaccaaggccaacccaagctaagtgtgaacttgtactatatcactgtaatgatcaatatttcaactcaacaggatctagaatcacctaggagatattttcctaggaacatctgtgaaggggtttcttcattggattagttgaggtaggaaacacacacacacacctctaactgtaggcagtatcatgctatgagctgggttctcaagttgcttttataaaaagaggaacacaagttgaacaccagcatttatttttcctgctgtgcacatgcagtctggccagccactatgacttctcctccatgataccctcacactagaatagaccttccttaagttgagctcggcaggtatcttagagcagccatgaggacaatgcctgatacagctggctgccggagtaagaggtcttgaggagggctcaagacatacttgtcatctggcttgcccatctctggatgttcctgtggccactgagctgagagaacagcctgttcttagagccgtatgtggggagtctagggaggccacatttgaggcttccccttaaccataccccctgcaggtatctgcttagtcttaagccagagtgcccatatcagaggcctagatactgaagtgaagtccaagggcctcagatatccatgacaggatccacacaccctgaaggatgtagcgccataggggttgcccatgtagaacatgctctctgctccagagcctggaaatgaagctactgggtgaagaaacaggacaagccagaggttggacctgctcccatgaagagggagctaggctctctgtggccttgaggtgccgagtcctccagctgcgtggcactaggtttcgggggtgctgtggtaaagggttaagctgcggtcacagacactaatggatgacactccaaacactcagctgctggaatcagcaaacagccccgcctgcttccagactgatgcgagcggagacaaaattgcatcttatttgctctttttctcttcttcctgatccaagctgtggtctgtgatagttaatcatcaggttgcctttgtgagagaacagagagagagagagagagagagagagagagagagagagagagagagaacgagaaccaggagcaagaggagagcagggtccctccaggtggcataggtggcatgcctgtgtggctgttgaccagattgacagcccaaggcttgttcagagcctcatttttcatctcagcccctctcagggacagagggccagcagcagctcgccctgcacatttgggcatcactcctggcatactcaggaaagcactgaaatttatttcttccatttgaatacaaatgcaattgagaccaaaaaaaaaaaaattttttttttcttgtttcagaagccactgctccagttctgtttctcatcaagtgaactgacagccaaagagagacgaaataagcatctaagcgtctggctgtgccgggtgaaataaaacccctcactcattatgggatgtggacacagtggtgtcaagctgtgttagcagccagggtggggccgctcccagggcagtagattagttacttatgcatcactgtgatcaaaatactttgcagaataatctagaagagggaagatttatgtcacctgtgcttttggaggttctcagtctgtcgtggtgggaaaggcttgcaggggttagtgggagtaagagcatgaggtggactggggagcagcaaagagcaggatgagacagatttgactttcgaaggccaaccccacccacccccagcccccaggaactacttccaccttccagggccctcctgaaggatccacagcctcccccagaatgcaccactggctgaggtagggacactcaaatcaagagcatatgggggagggggaggttccaactcagatcacaacaggaaggtatagagatagactctaagggctctgggtagtctggagtcattccagccaagagacaagaactcacagcagtcgcttgcctgactctacttgagggcctgtcgttcttttccctcagcctctaggcagagggaaagagacacgtccaataattcttgcaagatgtgtgctgcagagtgagcctgagctgggagcgcgtcctagaggaaggtggccttggctgagccttaaaacaaagatggatggatttgtacagagaggtctctgctttgaggtgagaggaagccagaggaagttcaagcatgggtgtttctgagagtgaatactccacttgcaggtcagcatggcccacggagctgagcctccaaggccaggctctgcctctgtctagcatgccctgagcctctgacaattctagggcctctatggctcctactcacattctgtgtcccaaaggtagccaagaggtcaatgcctctgagccaaccttgctactgagaagagctctaccaaagaggggtgtatgatgtgcagcaccctgtctctgacagagcctcttgtaaatacagttttgcttccaactgagctgcaaggcgaggaatgttgccaggggttgatatctggggcaggcgttcccaagctcttggcatctccctcaaggaactgaaataaaggcgcaccttgcctcagacaccctgtgcccacagaaggctttgtcttccgagtgtcttgttggggagctgtaagctcaagagtgtggcagctctcgggccattcaagtctggctaggacctgcttgctctgatggatgctaaatgtgacagttttataaagcctgtcaaacagctcaatacaggaaagaggcagttatcaaggctgggcagaaccaagcagacccacacaggcacaggacggggctggtgccacttgcccaaccccctggctgtgctgcatcggattcttgagcaattatggggtctcagaaacagaaggacctcttccccactacagagacacccccccaaaacccagactcaagatgcttgcctccctagggccttcagactcaccaggctccaactgagagagaccgtgtcccttgtcccttactcttaagctacccagtcaataagagccaaggctgagctaataaaaataagccagtcagtttttcaaaggggaatgatggttcttcgctgagtactcagtactgtgctaagtactttatattgtatgttgttcagttctcaaacgagttgctattgctatcccgttctacaaatggggtgactgaggccagacaacagcaggactgtgattaaagccacaactccaaagcatttaccccaccccctagactttctatgggagagtgtaaggaagtacttctgtaaggcttcctggaagaagtggtatttgttattggaacagcttctagaaggtgtgatgtttggagtgactcaggggagacactgcactacaacaacaccagagtgtagaacacactcaggaaacagggtgacacaagatcctggaggataggcaatgtaatgttcaccagagcaagaggcctcaaatgtcagaccaggggcagccaaccaaagctctggatccagagagaagcagaagcagggccgagcagtctaggatctcacacctggatctggtaaagagtcatctagcctgcccctccctcctgggacagcatcccggtggcatcccaacctcctgtgagtgtagcaggcgtgctgtggagagctcatctcccagactcctcacagtcggggcctcatgatgctctggctggaggcctagctctttgcctgaaaacttcccggtacctagcccctgggaagtatgtgatgtgagccagaccaggcagcctggcaaggcagggctgcccacaatcaagggactgcttctaagtgaaagatgtggaaagatatttaaaatcaatactcccgaattaggttttcctactgtgagcctgaacataccccattcaaaccccaaatgtgaaagaatgtctgggcggcactgaggcgtcagcgtgtcttatgaatttacaggcgctcagaggcactttgaacaaaaacaaaaattgtagaaattgtttccaaacaatagccaggaaggctgcctacccgttagggtccttgcactccatgtgagctagctcagcctggcctgcatccctaattcccaggccctctctgtgtattttactcagcggagggtcctataagagatggtgttactgggagggagctccgctcatccacaggctccagagcagcctcgtggctcatgggttgaggttttgcttaaagcctaaaggtgagaggtctttgtcaagactgaagaggaatgtctgagtgggtgggcctgtatccaaaatgtaccccatagaaataaggcctcttcagaataaggagctcaaatgtgtggttttatgtgcttgaacttagacacctagggatgtttctccaagctccagggcccattaactctctctgactagcatacaaactgacttgcattcaccaccctctggtatagcgttagatgccttacacactcctctcaggagggcctggaggcaaagtttatgatgagtcccattttatggaagaagaaactgaggcactgagaagttaaagagtttgcccaaactcagagactaaaccaacaatcagtgatcctgcacgggtctgacctaggtcctctgcctatatgattatgtagcttggtcttcttgtggggctcctaacagtgggagcaggggctgtctctgactcttttgtctattttaggcactcttccctcctcctgggttgcccattccaggcttaatccaaggggaagtgcccagtcttaccaaaatttgttatgctgtgttcagtgatatctatgggaaacaaggagaaggactgaatctgagagaaaaggaacattgggagggggagctaagaggagaggaaactgatataagagaaaagtaaataaaattaataatttaaaaaattgcacagtcaataaatagcacagctggaattaggatccaggcccctagtcactgcacaatatcctagctgacatgctgtggtccttcccatactgggacagaaaaattcatattccattgtcttcaggtgctcatagtagagccaggcaccagacagaggtcttggtgccctgggtgatgaagccactggcccagctcccatccagaactctatgcttgcagcttttggtcaaccctgagagctgtgagattctgactaacagggtcatctgatatagtttgcccttaaacatgcgaaacccaggagtcattcttgagactggggagggctccagacagtggctgcttcttcagccacaggctgtgccaggtgacatcaagctgggtgcatgggaacatctgcagcagctggggcgacaggggtgctttggacctcatagcctgggtgagcttccatgagtctcacttgtcagggagtttgtgtagctaaccccaagtctagaggagagatatgaactggatgcaagaggctccgcaggaggtaggtcctgcatgaaaccctggggagttctgggaaagcccttcagagcataggattctgggaaatgatgcctcctgagctttggtgaggaaggtgtgaggttcgggtcatcctcctggcaagggtaaaggttttgtttcagggtaagattagacagaaccttgagagctagcagcagcttttagggggcgtattgggatactggcaggtggctcctggctcagccttcttctagcttaaccagatcccccccccccccccgcctctttacaattcacttcagaactgaagtctttattttcaagctttagtgactccaactccacgacccgctttgccttatcttttctcttctctgaaggagagccccatttctttataatcagaggacacataaattctatgcagctctggctgcctgggacgttagtacaggcggcatcaggaccactctcaggacttcccagagcagcttccaaagcatcatttagtgttcccctgccccagcatcttctgtgactcctcttatcgcctcaccaaatctgagctcttgtgcctattcattctgtctcttgctcaggccagtcctccctacccagggtctcttcctacagatctgcttacattctcctgtgggacccctctacatacaaacaccatttgtttcaggatgataggaacattgtctaactcgtcagtcttcccagcatcagacatcacgtacccaataggattatagaaagtctgaagatggcagctgaagagctcagccaggaaaactcctgtcatgcaagtatgagagccagagttcaatatccaggtcccacataaaacaagatagacacagtggcctgcctcttgtaatcctagcaccgggggagggaaggaggaggcaggaggcttcctgcagctatcagccagccagtagtacaacctgcttggtaagttccaggtctgtgaaagaccctgtggacggtgtctcttgaggaatggcacagtgtgttagtgacttttctattactgtgataaaacagcatgaccaaggcaacttagagacgaaaaggcttgtttgggcttatggttccagagcattagcgttcaccagcatctccatgaggatacatggccgcaggtaggcgtgattaccagagcagcaaactgaagactcacctcttaaaccacaagcaggaaacagagagcaaatcatgagtgctgtgagtcgttgaactttcaaagcccgcccctagtgatacacctcttcccgcaagcccatacttccttagcctccccaaacagagctaccagctggggaccaagtattcaaatgccacaaactagtggggacatctcttcaagccacaatatgtggtgactggagattgtacccgggcctcaatacttactcacaggcacacgcatgcatgtgttctagcaccacacagctcactcagaattcagtgtgagccatttccaagtcaggaatgggaagaagttgggggttcatctgggtcttgattacctgactctgctttatgaaggttgggcaagaacttgcaacacagagagagtagtccaggccaagtcgggctgtggtactgtagcacccagtgggagagcagtgccaggctgtgtctacacagatggaagaagaaagacagtgggcagggcatgctgcgaagagaagagccagcaggaaccacccacagcaacaagccagagctgccgagccaccacaggcagcgctgagcctctccctgccaccagctgtccacatccatcccccgtcccgctcccaccccaagggacacctgccttaaaatcaaaaaggcacgccacactctaacaatcggcaggtggtgtttttaacaacatcagtggagtgggcccataaaggaagcaagtttttgatcagtggcaaaccaacctggaagcccgaacttggaggatcggctcctagatgtgtgcttgtagttccaggggtaggaatggatcagcagcccctgctggcatctgtgctgaccacacctctcttgctgtttcctgatcttgctcctttacccttgcctcaggccaggctggtacagcacttggaatcccctctgcacagtacaaaatcctcagaggaggtctctgtgagtactcctatagctaacacacacacacacacacacacacacacacacacacacacacgcacgcacgcactccccagctctatctgcacccattaccaatgccttcagagcctgctctcagttccccattaagccacatacagaacctgcttctctccggaaatcagaacagagaggagagcggtgtgttcgtcatttggaaaaaacaaggagagaggtgtggacagatccacccttctggtgggacccatgcctgtctatcatttggacagccaaggctcaggcccatagaacaaggtcttcaaggcacagcggaaccctgttagaacctacagttgtctccatacttgacagccccactcctagctcggtcagaagccctacagccccagcagaggctttataatgtacctttaggggctaccaattcccctaccatcactcctgaccgtgttactgaggagacaagctgtgggctcctatggtggcctgctgagaacacagtagcatcttttagctcacgaggatgtactacattcttgccagggcctcactttgtgccaacgtgcactccatgactctgcatctgaatcacatctcagaacttgaaaggtatcaatgacaatctctttgagaggagacaaataccatctgagtattccaagtctgtcttatccagagaaaccagtctctgggaaaaggtctcattgttccttggtataaaagtcaggactgggcagacccttccagagcaagaatcctgaggtttagagcgagggttgaccacctgctggttcaacgggccccagcccagggaagacttagagtcagtcccactggccaaagcagagtcagtactgtgccctgtgggcaaagtgactccagtctctgccggggacttgggggtggggttagggagttggctctagccccagggtatgaaggcaggatgctgttgtcttctggacagctgtctctactctcatccactacaccatgacatatttcagttatttcacagctgctaatcggaacctgacaatgtaactctgagctggcagctagccaaggcaagtggcctgtctcccagatggctgcaggctccctaccccaggacccacagggtatgccaggagcagtcctctgaggagccctcagcacataactaggaaacatagccacacttgactctcctgcacccatcctgcctctccccgggagccctacagagccccagccctctccatccactgccaattcacgtaagccctccactcccagaggccttgcaagaggcagagccaatccacaagcatttctcactcccatcctaactttctcccgtggcctaacttagcattctctgctgcacacaggggactccatgtactcttgctgaacaggaaaaaaaaaaaaaaaaaaaaaaaaagactgtttgtgctcttaccagccatattatattcacctgccaagacaagacctggccaggtccctagtcttgaagtcaagaacctcggtgccaaacccagttctcaaagtcatgtagtcaccatctgtcccaccgttcaatccaaaagccttaactcaagtcctctggccatgcccgccactcacctggcctcttgagagccgacctaggctccagcgtcagtgaacagcaacacagtaagcctactcagtgcagaccctcacctggcagctcataagaacctctcccttcaccttccagtcctactatgtgcatctcctctttttactcccacttcagtttttggggccagataatcaggaaaagcctcggtgctgggacaaaagggacctgggggagagtatggctctagagtcctgaggaatgggagtgctgcacctttctgtgcctctgtttcctatctgtgtgatgggggtcactatgaatctggaacttttagtaggtaatatgtgtgaaggcttgggggaagacaaggtgcacagagatcagtttagttgatggtttttgcctcttacatttaacctatttaagtgacatttttttctagatctagagtgttctaagccaggccagacatctcagaaagccccaggacccgtgcataacattggactgcctcttgggggcagttaatgcatgtcacagcaggcccaggatcccaggcaaaggaaagagcaaggggacctttgtggcacaggctcagctcacctgcacgagttcacctacctcagtccctgggtcaggcaccgagaggattctaggactcacacagttagcaagggcagctgtggcttctgccctccaaacctagattcttccccagaaagagacaggaaagctctggggagggtggtgaacactgaggcccctttccaaggaacagcgttaagaaggaaagtggggctgtgaggaaaccactcaggcatccaggggacctggggctgggaaaagactgccatgtttgagggctgagggcaggccagcatggctgggaactgtaggtgggcagccctcgttcgctctaggtaggaccataacctaccaggctctgttctagtttggggaaacaccaagcccaagagcaggcagctgagatctctgcctttggggccttctgggtaatgagtggtcacttacttggttccctcttttaagagctaggcatttgatactaccatgtcatgagcaggtttcagaccagctcagggtgatattcatgcctcatcacacccaccccatctggcccagcccccaccccaggatcccattgtagctaggggtggctcaatcatgaagagtcatggtcggactcttcttggtagccggctcaatgtggctgggatgcacacatgtgactgcctggtcatggcgaggttggcctcttcctcgtccccctcaggctcacctgccactctccacccagattggcttatgcatcatggctggaaccactggccctgaagtgattagcagtggggtcagagcaggtatcaccctgcaggcctggaggggggctgtgggttgacttgcacccctgaactccaccaatgaccctgcatgcatttcctggcagagtcataacaaattgctacaaggtagcttgaagcactgaaaatatattctctgctagttccagagacagaagttagaaatcaaggtgtcactaagccaacagctcctggggccctcctctgctcagctggcttctggcagctcctggtgttcctgtgcacatggtaacacaacctcaggctctgcctccatcttcccaaggttgtctactttgctccctcgttctcacctcttcctgtgaggcgctcgacctcagagtcggggctgaccctaaaccctagataagctgtcttcaaatccttaactgactatatctgaaaagatcctttgttcaaataaggtgacatgacaagacccccataacacaaagggggtgggggatattcaattccccataggccctaaggaggctaattgacaggaagctgatgtgggtcacctgccatgtgtcctgtcttggaccacccaaaaccatgtcctcctggccactactcctttacacgatagctcaccgtgtcaccatttcagattcccttcatgtccactgagcttccccggccttcctagaattgcaggatgccaacctgggtccagcccatctctcaacactaggggctcaagtgctaggtacagcctatggtaccagatccagagaacgcacattagccctagggaagtcgtccatggaaaacagcactgataaccaggtatgacacaggaagaggaaggagaatcaggggtccaaggtcatctttggctacatagcaaagtttcagatagggtcagtttcactcaacacaagctagggtcatctaggaagagagaactttgactgagaaaatgcctccgtcagattggcctagaggcaactctgcgaggcattttcttgatcaatgattaacatgggagagcttctcctaccatggggggtaccatccctgagcaggtgatccaagatcatataaaacaataagcaagccggaggaagcaagccaggaagcaagccgcattcctcctcggcttctgctccagttccttccctcagtgacagactataaagtataaggtgaaataaactctttccttctccaagttgctcttagccagtgttttatcacaggaaaaaaaaattaaaaaaaaaaaaaaactgggacacccaggttacatgagacactgttaaaaaaaaaaaaaagcctaaagaaaaacagaaaatagcactgctcttcttgagctgaatatcacagcgttacccaaattactgctccgctgagccaactgttgacagggctgatgaggggctgcccccctcccaaggagcatgctcccttgtggcctcagggaatgctactaggcgcccctcctggatctgagcccagggcttgagtttcaggtctagcaaggctaccaggagtctgttcacctcaagctcccttgccctctgacttcctgttcacacatctgtgtgaagagaaggttagctgtgttccttaaggacccttacttcccccatgtcacaggtccaaagcccaggtactgagaaggaccaagggtcttccaagtaggaatggcctacagacctatcagaacccaacaaaggcagactaccctctcctgggataccaaatgtggcctcagctcggacaaccttctagggcaagcaggcaatcaccctgtggctcctgtaggctgctctgggaaggatagcatcattaaaccctcccaattcactgggtgcagacacaaactggtcatcccagccacacgggagactaaaacaggaagattgcaaagtctacctgaacaatgtagtaagttcaaggccagcctaggcaacttagcaagactctgccttaaaataaagagccaagtatgtggcttagtgagattctttgcttagcatacacaaggctttatttgcatcagcctggtagcattgtgggttgatccaagacctgccagtcaccgccaatatactagagtgtccctgggagtgtcatgtcccctcctccacagccctaacacacctggacattgctataagctcatcattgcctttggccagtgtctctgtctggaagtgtaggtcacaaagccgagagcatctgagttgaagtaaagggacatagaacagcagccagagtagagataaggccagaaaacccaggtgtcttcaattcccttcaaaaattaagacccaaggtctgtcttgccctctgcaaagtcagtgtgtggtaaagactcttggtccaggcatggaaattcagagaggggcacagctctgaccactgggaccatctgaggtaacaagtcccatatcatacagacttctttctgtgtgccttgagatggctgttaatggcctttgtgtccccttagaattaacttcccttatgaatcctccatagctgttttgagcaaggcttcaggcttaagagtgcctccttaacagcccgtctagcacgcacaaggccctggatttaacccctggtacatcccagtgaagtaacctcaccagcaccctagacacctcgctcatgccaccccatgtgtcccctcctggtccccacaccttttcttcctccccaacataatgatttcctgcccagcactgccagtaacttgtgtgccttagaactttgtgtcaatggaatcacacagtgtgacccttccgtgtctggctgcttgcccaaagctgtctgcaggttcacctattgtaactccatctatagcagaagcccgtccttctttctcccgagcaataatagtccattgtaccaacatgccagaattgacacagctgacttgtttcccctttggggaaacttttttctgaagtttccgagaatgtacaagttcttctacaagcctttgatgggcattcctgccagaaacgtgcctcagcatcagattgccgggaggggttgttcatagaatgacacgtgttgctttaaacacactcctgtcctgtccagggaaagaattagctggaagggctgagggtacagaggctgtcttttgactccaaggcctctgctcaaagtcagctagcaacacagcctggaaggacgtcacaaccctctctgccacaaccttacagtcctacagactcacccttgcctttgggcaagtgccactgtctgggaatgtaggtcacacaactgagtgcttctgggctgaggcaaagggacacagcgcagcagccaggcaggaagcccagggcaaaagccttccaggtacattcaattcccagccttccctcctgtccgaatgtccctcctaccccccacctcctttcctcccccccctccatgtgtccttcccccttacttcctttccttcctcaaaccacactccttccatctccaagacccccaggcagccaggaactgatacagaactatgagcaccctataagccccatcttggggcaagattaccctactttaaggaaaatgtttctctgtcgatttaaattacgtttggtatactgttagttaaatatgtacaagcataaagctgggaacatgtcccttatgcatagagctcttttataaccataaagctcaaacaaatttataaatgaaataaaaacaaactgcaaaaccaataaacttcaaattaacaacattaatttaatggaacaaatgatactgttttcctgaaactaaatcagtgctcacagcgtgactctagggcggcctgctgtggtctccatcttctctgaaactccactatgcactgggggatggccccagtttcccaccacaactccacttgaaacctcctgtcacgtagtgtcccaacctctttgcgcctcagttgctcatttgtgaaaaggaataagggagacagcttatgtggggctggggatgcggctcaggggtagcatgctcacctagcatgcacaaggcccaaggttcagtttccagtgccgcataaaactagacatggtgcacacctgcacccccaggaggatgcaggtattcagtgtcatctttggtgatatcagttcggtttcatctttgtctacatagtgagtctgagccatcccaaaatacatgagactctatcttaaaagcagaggcaggatggagaaaaggccccacagttaagagcacttgttgctttttgcagaggacctaagttcagttcccagcacccacgtgggtggcttaaagccacctttaactccagtaccaggagattcaacaacctcttctggcctctttgggtccctgcatacataggcatatataagggcatatacccttaagaacgtcatacctatgaaaatgaataattttaaagatacttgtgagaattcagcctttgatacacatagagcttcctggacttgactctctggaagccagaaaagcaacctcagtacacaaggaccccgttctgctggcaacatctcagaattcttatttattttatgtgtatgagtagatatataatatataggtatagatatagattatatagatatagacatcatgtatgtgcaatgcccacaaaggtcagaaaggagcatttcattagatgccctgaactggagtgacagagaattgtgagcagccttgcagaagcagggaaccaaaccttggtcctctgcaagagcatccagtgcacttaactgctgagccattgagccagcccttctcagcaatttttaacaaagggtcctctgtcttcatactacactgagctacgtacttatgtcggaggtcctacgggtggtagatctgagagcacagtgggcactcagtcctgtttctgtgaatgcttagtacccctattaccaagtgcagtttccttaggatgttttcctcctagacagtaccatctcctattgtgtgatgggggttggagaggccaccttgtatgtataattggatttgagtaattcttagagttgagtgtgtgctgtggagcatggacgctgtagtggaagaaaggctgtcattctcctgagcacatgaacccttgcccacctcagcacattggctcatctccagctcccaggcttcaatcacttttatcagaactagtgcaaaaaaccggggccatttgaaatactgcttgctatttcctccaaactgcttaaatcaacggccggagtttaagttaacaggttatggagttgaagacaccttagtggattaggagctcatacggagttgctaatttaatttcccccttttattgctgctctctgacaaaacagcacagataggcctttttctgagaggaggatattaataaccaaggcatactccaagagcaagggtggcattaagattttgcaaggtcactctatttgcccctggcttcccaaggttcctatgctggcccagataggacacagacccaaaggattaagtgctcaaaattctaggaaatggaaactgcccttggccactgtcaacagaatcaagtagcagccagacctgccctgagcagatgtctgcaatcagctccacggccgctgggtatgggcaggggcttaccaaagaaaagtgagcacttgggcgtctaaggatactctcactgtgtaagacttggatgtcccgggagagtccgtcttccttcttggggcacagtagattagagacctccctgggctcaatgagcagcttcatggttagtttcctagtggagattcagaggggaccttcctgggccagggataaaaggagggtgtgacctgtgcctagctagcatccttttttagtccctgggctgggatcctcctttcccttaccataaaacctgagttttcctttgctaagccgaggcctgtggacaaggatatgttgtgacagcactgttggagccaccccttctgtctgccactccttcctgggccttctggatttctgcagccttagagcatgataaaccccagaggccatatgtggccagcatccactgttgtaactctccgtgagatgacttccaaggacgggacaaccagcttctgcagacaaatgtaacagagggctctgagcccaagatggtccctcctctatcagagggtcccacaggcccaggcaagatagcccagctgcatcagccacaaggccctatgatcccagagggtacctgcaatgtggcaattagattctagagataatgttatcccaaacctcacatatcctcactagctgtgtgtgcaatgcagccaggctgaattgaggcatgtagtaagtgtaaagtgtacttagttcattaggttttatgctgatgacgtgtcaaaatgacatttcaatcaattaagttacaatagattattggaatgagcaccactgattttgtttttctgtttcatgtagctgatgggaaatggaaattagatatatgacatgagttatatttccagggacagtactatgtctgaagaagacagaggagatgcctcacaggtcaactaggctgaagttgaggggataactcagttggtagattacttgcctaacatgcacaaaggctggctttaatctctagcccaggcactcggtggtgggtgcctgtaatcccagaactccacaggcaaagagggtcaggagttcaaggtcatcttcctccattcaaggtcagtctggctacacggggccctgtatcaaattttaaaaagagtcaaccagatagaatcatgaccagaccgagtatggataaactatatcctaccatggtgtgggccccactgcaggcttgcttctgaactgtggctctgggtggcctcctctgccaacccctgcagtagaaggaggttgggaccgagaatcctggcaagaagccctcaaaggagggacttcaaggctgtactgtgacaaatagtaggacggaaaggcagcgtggctttccaggagcacctgggcacaagtgacaacagatggtctgagtttccctgttctcttctggatcaaggtacaaaatccagagacacaatcccagacctgctgtcacacagacgtgggcagacatttgccacttggagtgcagctccttcagtgctaacgcagcatgctggtttacagactcataaaaacacaagagttattattcctccaccctgcaggcctatctggggtacccacttaacggcacccatagaataaattacttccggatgacactttttaattgaattgaactaacagctcagtaatatgttgcaataagaagaatattaggatgattaaaagatctgaaaactcttgcaaaattaaatgattaaacgtaacaccgaggaaatgagtgagtctgtgtacattaatcagttgtgggcctcagcaaacagttgtgtagctaagcgctcactgcagccccatacactcaaggcttctctcttcctctgtgtggctctccatcaaatcctctttactgccactcagagagtcaagcggcatctctcagaggcaaaagagctgaagtcctttccattaggagtggtgtcaatcatggcctctggtcaaacactcattcctgtggttctggtcacatgtgttcatgtgtatcagtgtgtgtgaaggtgggtgtgtctgtgtgttcagccagggtgctaattgtcaacacttgttagtttaactgaaaacttgaaggagcagaaattcaaattacacacacctgcaatcccaacacggaggttggctacaaaaggagaataaattcccagccaacgtgggctatatgataagaatctgactcagaaaagaaaaggaaaaaaaaaaaaaaacctagtcaataaagtgcctactgtccaaatctgaccctgagtttggatccccagtacccatgtataagcctggcacagaggtccacatctgtaatcccagggtgggggaaggcagggatgggcacatccccagagctcactggtccaccagcataactctaagttccagctcctgtgagagccagaccctgtcacagacaataaactggtgatctatcaaggaacacagccacatgaacctctggactgcagagagacacgcccacctatacacacactgatatgcacgaacacatacatacaccacacacgtgagcgcgcgcacacacacacacacacacacacacacacacacacatgggttccagagaacccaagtgtgcttggttcccagcacccaagacaggtggttcacaattgcttgtaactccaaccccaggaggtctgatgctttcttctgaggtgcacaggtacccatacacagactatcctcatacatagacacatatatacacattaatagaaatagagaaagagagggaaaaagaattctggctttcattttgatcacaggaattataatttttggtaggccccctttcctccttctggttgtttttaagatgtctcttgtgccccatagcccaagtgtttaatctaccaagttggtcttaggaaagtggaggtgagtgtcatatgggaaaagcagctgtggacagtgtccaggaaggcgtcttctgtgtcccatcctccaccactgaccaccacactagccagcaccaggaaggtaccttctgtataacctagaaaattaattaccttccttacacagctcatcctccacctgctcagagaaaacacaggtcgtttcttttctgatcatataaatctttcatgccccgttcatagccataattagttgcataaaaattcaggttatgattcgggctgttattagggaaacatgaaaacactgagaagttgtgttttgctctctgataaaacctctcaaggtctccattacagagaacagaagggactttgtacctcattaaggttaaaattcaattcagagcagactctcattgactagacttgatgctgaatatatttccccaggcatgcctggcaggaagttcagggcagatctgctatcttctacaccctgtgatgccccacgactcccctccaggatgccttcccaggctaagggtctggagcttcctaaaacaaagctgtaaaaattctcctcaagtgagaatagatcttggaaagtgcctttaatacacagaggagattgagtaagtctgaggctcccgaagaagaggccagctttctgataagtcacagaaatgaagctgccattgtctaagggttgggggaaggtgggcgggggccactatgagttgtaagtactcctagggccactagattcttctcccccaacctggcaagctcagagcccaaggaagtaattgcattcccacagttaccctggagaccaagaatgttctgaaggtcagcaggtgttggcagggcatcagccttcacagtctccatccattgtacgtctaccacagccccaccactggcacacgcataatgcagctttattggaattctaaatgatcagggaagctcccctcagagggccaagggtctgagctctgaggaagggcattgtagcttccagaagcttcctgtcacgaagacccagcccattatgtgaaacccaccctcttcagattgagttaagtcatacctacagtgttagtgttagtcagttttctgttgctataatatatatgtatattacatatttgtatgtatatgtgtatatattatatatatgaatatataatatagagatgagagaaattaatttacatggaaaagggcttagtttggctcatagtattagaggtttcaacctatggtctcttggctccctcactttaggcctgttgaggcactgtgtgttagttaccatgggaacaagtagcagaagaaacctgtgtatatcatagaggctgaagaacaacgcaagaaaagaagatgccggggcctcaggatccccttcaagggcatacccccaatgatctgactctcttcctctagactctaccccctgtgctcttctacctcccaacagggccaacagctggagaacaaacacatggccctatgggaaacatctaaaattcagaccataatataatcagcccagtacccagcaattaactggttctgagcattggcagtgagcatggaggggcttgcagtctaccagatggagaagctagggtgggaatggccacacctcaatggttcctgtcctgaccttgtcacctgaaacaccctcttacttcagcagatttcattgatctcttgtctccaggacaaatagcctaaaaaccatttgttaaaactctgaaagtcgctgtcctgggccagcgggagaggggtgatcccagctttgttatcagaggaggagaccatttcattgtcctatcaaattattccagtatatactttgccattatcattactatgcccttcaccaccaggccagctcatgaacgaacattaatacgttgtgtgcagtctctttatggggaggatgggatcctggtggcccttgacagagaggactgggacaccatagaacagaagacttttgaaatgctaatgcacgctccctgcaacttaattttatttcatatatatatgacatttcacagttccctagcctcaatagctagagcagcatcgtaaaactgacaacatggtgatttacggaggagagtccatccaagggaaatggatggtgggcctttaaagaccctgtttagcgcctcttacctggggtcagtgttcattttcaatagtcataaaagcgttctgttaaatcactcgcagagtggctcgactcttcctctccatcattgtgttggattatggagctaatgaggcagagccccgcaggaagggccagaggaggctcacagggttttccctgagttaggaagtaccagagaaggctgacttgaattaaagacctgcagaggaaaccgcacaggaagagccaggctcatgagcacaaagggtttctaccctgaagttggtagatagtgttgggttccactccatcccagccttctctctctgcaggcttcacaagcacggcgttcagcaaaccaatattcataaaaatccaaaatgcaggcaggcctgcagccagcaacatagaaagatgaaagaggacccactgcatgccttgtggaattttctagacctagaaggcagagagaggggctgaacagaaccaacagggcaaaggggttgaagccaagcctcaagcaggacccagatgaacatgaccttgaagagtacttctgttctgcccccttggagatctccaaaagaccttgaaaagacaatcaatcaatcaatcaatcaatctctctctctctctctctctctctctctctctctctctctctccctctctctccctctctctctcccctctctctttcctttattttctttctaatctatactcgattgtttcataataaaatgtgctgattttattcgcattgaaagataggtagggcagatggctcagttggtgaactgcttgtcattcaagcatgaggactgtgttcaatccccacagtttaagagctgagcgagctgagaacacttagactcccattgctgggaagacagatggggtccattgggacttacaagccactgcctcttcttgtggtttccaatgctaggaaactgccctgtagtccagtccttcttccccatttcaggaagagcaggaacggagctgaggtccacctttggatttgccctggaagaagctgggctgcatagacaaaggagcagggtctccagaagctcccatctaaaccacaaaggcctcagcactccccagggtcttctgttccaggatctctatgtgcgtctacccagcctctcaaacaacccagtaaggcacgagataggcactttaggagttggcatccagttgtctaccactcagtgtgggcgggcacaaccttgcccacctctctgtttgaagctcaaaacctgtggccttggagctgagggcacagcagaagcaatccggaagaggaggagcccagctccatctgtggcattgggtgctccttccggagcctggccagtggctttgtccgtgttgttctgcccactggactgccctcctgtgcctctggtactgttgggctgctcttccgttggctttcttgggaatcaatgcagaatttttaactttcatccactggtttgagctttcaaaatgcaaacatgctcgcttttagttagagggctggccccaggaaaagcagatccctcccttggtggctgtacacacatcctgtcatctctactcttctcttctgctgcccagcctgaatgtggttcagacgcctcaacgtgaccagttagactgggggcgggagggggggcgttatccacctgtcagccctgcatcccgggtacaaaacactgcctagaacataagaggttacatggaaggggccaatgtcacccaaacatctgtgctcttccatctccataaactccatccatcaatactatgtatgctatccaaaagatcatccaaagagtacaacatcagaaaggagacgatgttcagtctgcagggatggctactgggaaactccagtgacagccaagtgttccataccacctgagtagccatgtcatgtggagcagcgtcatagcaccagtccttagatgccatgcaagaactatatatatgcatcagaacccctgatataaggtaggccctgctccattcaggtgctggagccacacccctgacggccaccacccacccccaccatccctgtggttggccagtagggggaaaggcctggcctggctcacctacactacatataaagcattcgacttctcagccatgccatccctggtcctggccagcttgccaagagcacggggactggcagctttggagttagaagaacacacaaagaacagggcagtgtgacctctgccgaggtcatgagcccacctattcctgagacaaacacggtgcaggccaagggttgggggttggggaggtcttttgatgagctcttcaggtattttgtgttattgataatacaaacataagtagctttgaaaactatcagcagggcttcaaccctcaaccctaatattctatgacctaatatagaatgctgaacacctgccatgcccacagccatgcttgcttacgtgggccatcagctttttaaagacctcctcatcttatacttttctgtcctcttatcttctcagcccctggccatcatgtcccttagggctgtgtcaccaaagaatccaggtggaggaaacccctagcacagagaccaaaagaacacagtctactcccgttctctgcttgctcagtagacagagattggggtaatctaggagctggccatgtcccttgtaggtcaggagaaccactctggctcagactggtatggcaacagcagctgagtccctgctaccctgctccgggagagactggcctgggacttggcctttgtcccttaatcctcactggttatccctattctctggggagatcatgactttctgactcctcccattgaaaccagagagcaaggaggtccccacaagtcacactggtgaacatctggctgccagcctggcaggtgaggcccccatagcgttccatgtctctgcccggagtctctgaggtgtcatttctcagagtcgcctttcctgccaggaggaacaagagtagcaggaaaggcagagactttcttttctagtcctgggggaaggagaggggagtagcaaaggtggggggagaggcacggagtggggtctggagagaggggatacagcatcggggtggggtcatctcagggcaggcccagcatcggcctttgaaagctgaaggctgtgtgtctgtctgtagccatgaggtaccttccagaactgactcacaaggaccacaggctagatgagaaggcaagcctgggataaagacagctcctcctcgacccaaagctccagccctagaccagaccttgccaagtctgtccctgggcaaggaaaccaacctatgttcctttcatcagagactctgagaaaaccttgaccaacctgactcttgacgctcccttactactcagtcagcagtagcagagggagatcaggcccctggccctccagacactcacccttggctgtggttcacctaggagactgtgggtaggtagccttctgagcctcaccatttcaatgggtccacgttactggtgtctgccccacttgtgggatttcattaggtttgcagtggtgtctggagcccctctctgcccatgtctccctggctaatctgcagaaccacataagcaagaagaaatcacttttatctcccaatgtcaggatccaggtagggtgtgtactttgtgcactagggaccctgtgttggcatacagaggctctgactttttgcaagatcagcaacagccaaccagtattgggaggactcacagtacttagagactaatagaagttctgtggtgataggtagtggaacccttgagcttggtggctctggggtcactctgcaggatgatcacattatatacttctctttaatgagggcagatgccccattgtgagcctggagccagggagaacatgaacaggattggtaagatttctgccaggcttcagggatatatgtcctatagagtcattcaatgtgcccattcctacaaaggaaaggtgatgtcccaaccactggccacagcagaacaccaccacagggtgtgtgccccaccctgaggagtgaagcagtatgcttgagcagatcacccacactcagctgcagccttgtcacttcccgttgtgtggctgtgagcatgtcttgcacctacagggttaacccaaggactgggttaatagggttctcctgtcggggactgtacacggagacccagtgaaccacattgtcctgactcgcacacccattccctttcactatgtaggtccaacatcccaaggtcctgccctcctgcctctgcaaaagtgtctttcttcccctccccctccccccctgtcactcttaccaagttattttcctttgatacagttccccgttattgagatctagcagagtgctaggctccttgggaggtgctgaggagcaataggaagccaagcaaaggcagtccctatgatgctgaaccctgctgaaccctgtccctacctctaccctttaccccttcacatcccgcccagtgctcccttctcagtcagtgtacctccgtgtggatctcacccacctgaagccaggcccaggagcacttagtaaagccatggtcctgacccaagagacaagtctgattgacaggcagtccaagaagatgcagggagaagaacaaagcagcactgagacaggaagtgagactggcgccagttcacaccctggtgtgaaggtgaccttccaggtgggaggccttcagagtagctgtggcctgcagctgcacaagtgcaagggatgatggtctgaagaggtaggaagaagggggtgggcaggcctggggaccacagcacaggaggctctgggaaccaggaaagacaatgcagctggccctgggagaggaaacttggctagtgaagacaaagtgagagatgagataagccatgtagggtgtagactctgggcacacagcaccagagtccaaaaggcaaagcaaagacactaggaatccactgctgaagactctcaggctgcccagggcctggccccagcagacactcatttggaagacacatgattgcttctaaaacccaggagtgtgaatatattaactctgctcctttgatggcactgagggccactggagccagtcaccaccagtgacatccagtgctttgggaatcactgagctgggattacagcatacaatggggacagatggaagcctcctggggtcattccctccccccagtcctcagcagaccaggacccagtggacatgtggaaggagccaggaagcagcccctctctgtcttcaactgagcttcctctgtagaccctgtgatcctttccttcctggtggggaggaagcagagtcagacatggggcctctgcgcagatgggcttcgggtgggcaaaaagaaccgtgcaaagaatcttgcctccccaggcagccatgtggagcagggcacttgcaggcagggaacggtggaactggagtctctaggagcaggacaggatactacgcagtacagagcatgtggtagtgtatcttcagggcttatacatgagatggaggtctataaacagccatagagtcactccgtggaatctagagactaactacccaaaatgctgagctcctttgaacctgtcttgatagtgtaccaaaaaaaaaaaaaaaaaagggaggaggaggaagcagcggcagcggcagcaagcctgggctcagcatggaaaccgctgtagattcccaacatagatttccgtccagaatatgctgccttcctgtcatgggagccctttgtcagcatgctgacttcagcttcagctgccctaagaacctctgcagcatccctgggctgcaggagagtactccatccctgggctgcaggagagtgctctcctgtctaccaacaaaggcaagccatagcacagcttcccataaaatgcaaaggacctaagcaactgatcctctactgctaagaaggatgagttccgccagggatactggtgatggcactcagtcccaagctaacgagtctcaaatcccactggggtgtggattctaccactgttgctctctgcagctctgtgtccagtccctgacatggggaacagccacccagcatggggacatcaaaccaggatggccagtcatgcagggttgtgagcagcccacatgtcaggccacccttgtgggcctgtaagtcccgaaaacagcttcaaaggagctgcacacaggttcaatgcacgcaagtcctggatgtgtacagcacccctcccttgcatgcgatggactgcaggaacatctctaaagtaaagctgccaaataatgtttggaactatggttttactcttacttatgtgatggttggaatttttctgattttgtaggattcaggggagggctcaccctgcccatggttcaccgtagcatccaggccaagtgccgtaagggcttccccctctggagcaaggtagggcaagggcagggcagagatgaagctaaggcctagagtgtccacattggccttctgccagcttccctggtttgagcagagatgtaccaggaatatttgtaaatggctgggctcactggtgccagtatggtcagtgagcatgggaaggcccaggatgcatctggagaaaagccaagagttcactttggctccgtctaagcaggagcagtgggagatgaggtgttagtggagcttgaatgccaggcaggggagggcagatttcccacgagagacttggggcaaaacactgccatcttctagagagacaaggtcccgccagggagccactatggaggggatagagagaaaagggtagatttgcaggggcacaggatgggttgacgatagctgtgatgataaggaaaggtaggtaggatgggaggggctcaaccctccttttctcaaatggcccgttcgctcagttggccagcggccctgtgtgggcacaagctaaggcagacaccacatagcacttctgccaagaagtaatttgccatgggtcaagatgtggagatttccaaactgacagatggtggaggggtcttgggagagggatccggaggcatttttcttaccgagacttgtccttggacaaaatgtgcatcacaggggtttctttctcaaagataaatgaaagaggctgggtgggggggaggggaggggagggagggagggagggagagagagagaaagagagagagagagagagagacccatacaggagaagaaatctctcacgtcccagcacttgttaagaactttgctgacatggcttttgcctctccgagaaaatcagcaaaggttctgtggcatctctaaagggggtgacagtcactctcaggagatctctctcccccagtcagctgcctgtacagggatccataccccaccaggggcagcaagtggctcgagcagactgggtagctcaagggtacacgtggccctgcctagggaaggaaagccactgctagcaaacaaagaaaacaagtgtccttacgtcatgacgttggagtatgccgtggttttcccaaacggtgccactgctggtatcggaaccagagaaccttgttgtagggtctctcctgtgccttgtaatgctcagcagaatccctggccttcactctgcagaggccaacaggaaattgtcttctcccttcaccaccgccattgaaaccaaaactgttaccaggcagcaccagaaatctcctggggactggagtaacggttagtggagaaccacagatagagactgaagggccctgcctctcatccccaccctccattccgcttcccaacatcatgtcacacccaccttctgtcctgttgtaaagccccagggctgggtgtagagacacgggcctcttcagattggaaggattaagaggttgaggctagcctgaggtatactggtgagaactgtcctcaagcctccggccccttgattttcttcatagtctcccagggatcccattttaaatatcactggagcatgggtacattgcaaagttgcttcctagcctagaccacctctcccctgaaccctaggctgaggtcacaatcgccatccacgtccacctaccgcagctgaaagccgttctctattccaccttctgtagcctctctcagtcgttcaacaaacagagccagcaacctggccagaatttcagccctgagctggctaatcagcttcacatcttctctttctatcagtccccacctctcatctatcatcattcagtcaatccgcctccagcagatgacccagatagtctgctttgcaatcgctcatggtcttgccaaagcccttggcaccataacaccagcctcctgtcagcttgctgtcccctccacataaacaatgagcattgccccttcttcctgacagagcctcctcctgacgggctccccacgccagcctgattcttgcctcagtggctctaagaacgagggcataatgcaaatgtgactgtgaagttagaggggacaacagtgagggctttggagaagggtttctttgttctgtaggctcagacatcctctctaccggctcaaaccatggagtacaggtgtgtgctatgaaagcgaggagtccacaggggactgaggtggcatgctgagtatgccggagggaccgtgattccctgataccaagggattaacctgcctaggaaactgccaccagggtgtcctattaacacagctgggcatttctactgcaatgcttgatgcacagggttgtgtaagccagagcacctctgcggcctgcctgaagtcctcctgtgacttctaaatgaaatccaagcttcttcctgacaccacagtgccagccctgctctagtctccacactttactggagtcactagggttccaggtctgtctctggcagccccagcaacctaaatggggacaaatggggactggaaagatggctcagtcagtgaagtgtttgccaaacaagtctgaggacctgagttcaatccccagcacatacataaaagattggcttggtaggtgaactcatattttttttttaaaaagctggccataggggctggtgagatggctcagtgggtaagagcacccgattgctcttccgaaggtccagagttcaaatcccagcaaccacatggtggctcacaaccatctgtaacaagatctgacaccctcttctgaagacagctacagtgtacttacatgtaataaataaataaatctttaaaaaaaaaaaaaaagctggccataatggtatgcctctctaatcccagcactggggataagcagagacagaaggttccatggggctcactgggcagacacactagactatttggctagtctcaagccaatgagagaccctgtctcaataaacaagtcgaatggctcctgaagaatcacacacacacacacacacacacacacacacacacacacacaaacattttaagaactaaataaataaatgagggagttggcagaaggtccaagggcctggagcccctcagctggtatgcatgggcagtgtgggaagctggcatcagacacaagtacaaactgctctccaaaatggactgctgatgcctagttacaaagtgcagccatgactgagcatcctctggaggataattaaccagaaagcaggctatatttattcataaccctttccaccatggcttcctcccctttgcaggcaagaagcatgcctggaccttggggtggaggtaaaatgggaggagttggggctcggaacagtgaggagagagggaatcctgctgagtgttcttgccccaggacacacagagagggacttggaccctcatagaggcatcttttctcctggatgatggctcacaggaggctgtcactgagaaaggccccccacagcttgcttcttcactcaggaagctaagggtgtggctgtaatcttcatttcccactggcacttgggaagggctataagctaagccagtggggttataggctaaggggaaggggagactctccaacctggagtttccctcctcatctgtcctgcctcaaggataaggtgggaactcaggagagccttcttggtacctcatccaagctgatgctgagccttgtccagtcttcaccgtcccccgaacctactgagctgcttcctgccttggcctctacgtttttccaaatcctctccctctccttttcctagaaaatgaccttagccacacaactgccagggcagtgcaatcaggtgaggtccttttctggttttaaaccctccctatatggctggagagatggtttccatgattaaagtacttgttacacaagtgtgaggtaacgactagagttccctggtccacagaacccaggtaaaatgcccggtgggagtggaggcctgtctgttcttaagcctcggaaagtagaactgggagtccccagaacatgctgactagcaagactagccaaatcggtgaactctgggtttgactgagagtccttgccttagtgattaagatgaacgagccactgaagatttctcagaactccacatgcatatccatacatgcatgttcacacatgcacctaacatgtgtgaaaagggggaaaaaaatgaattaattccctgacacttcccatcactttaaagctattagaccttacctcaactcttttccacccagtcacttcctgcctacttgcaactgtgtcacataccctgccatatcagccacactggtcttttcttaattcccacagcacttcagtgccccccccacacacacacagaatagtaattgaaaacaaaacacaccccccaccaaaagaccattcaggctcatcctcaggtacatacaagttctgggccaacttgggatatctaagaccctcaaaatgaaaaatgtcctttcccctagtctcctcacctttcaggtctcaggtctccatctaactatagttgaaccagcatccatccaccaaacaaggccaggcaagagaccccctcctatggtctccctcctctttttcttcatatccatcatgcttgtaaccccatttcatctatgtgtttccccgcccctctgacgtcctccataggcggaggagacttagaataggatcttctgagtgggaggaagttccaaggcctcttgacctgctgctggcttcaggtaccacccacatcaccctgctgttccctcaatagaaacacattaacttgtaatccttcttttccaagggggtgtgataggtaattacaacgccatctgctatagaaacctccaaatctcggtagtatgccacagaaagactgagttcgccaccctcatcaagtctgatggggttgggcagctcacctcaaatagagatgaggagtccatggtcctcacttatgcctgaccgtcacagggtccctgcagcaggaggccggagtgtgggtaatggctttattaatcagggttctccaaaaaacagagccaaccaacggagctggaggtagcagtagaaactgagatagcgagacagacagacatagattctgaataaagaaattggtctacaccattctagagctgaccagtcctgagctctgctggtaacaggctagagtcccaggagacctagagagactaacagtatccatctcattctgaaagttgggagttttaagatccaggaagggccatttgataaattatttgccttgtttctaggacaaaataccctgacaaaagtgagtgaggaaaggaaggaaagatttatttcagctcacagttccagggtgcggcccatcatggcagcaggagccaaaagtcgtgcatcccattgcatctgcaacagggaggaaaggtggatgctaacgttcagttcgctttctcttctcaatgcatcctgagaccccagcccaaggaacagtccctcccacagtcatacatgtccacctctgttaaactaatctagacaatccctcaaggacatgcccaagagactctagaccctgtctagttaaccagtcaatattagtcatcatggccaacatcctgcctcaatggcctctcttattcagcctgcttattctacttaagcctttgactgactggatgaggcccacccacgtagaagggcaatctgctctactctgtctccagactggagtcttcctctcccccaaaccacccccacacagacagagtaatgattgaacagatctctggtaccctatgaccccatcaagtgaacacaccaaatcagcccccatagtagcactgaggatatggccaggtgtcgtcacacacacaaacacaccataacatccaattatatgtgccccctgactccaagagaaatggcagggtaaacactcaggaactaggaaaggacacacaacagcctttcctggggttgtagaaatttctgttcctccctctccgtccagagttctgcacccagtcttagagattctgaagtatagagtaagtggcgtgtaatgacagaagatgcattttaatgtcccttcccctaatgccaccaaggaataggctggtagtgcttgccaataccatcgtttttggcagcactgtggattgaacacaggactctgccacctgtttgaagcaggtatcctgatcacggagtaagtgcctagctcaccctttgcacatatcctgggaagaggtatttctatgttctaagggaatttgaagtaaggagtcggagacacatagggtggcctgtctcattgaggcatccccaagctcaacatggctagacatggctcggggatggccacaaaccctgccgaccaagaagccctgaacttcctagctcaacactaccccctcgttcccttcagtaggtgcctcagctgcctgccacactgggatatcccagaacaccaaggaacaggaacatcaaaaccttatcacactgttgtattaacttctccagtcatgatgacattcagttttccggaaaaccccaaaaggtttattgcctagaggaggtgaacagaccccaaaactcagaaagactcccaggtaactctacccctctgcaccagtccatcctgcaaggaaagagaacctataccaggcagggcaactagaaaggacagggctctaccttcagcattgagtacataggaggagcccatgcatggaggggagccaggaactgtgggagccaaggatcttgccctgcatccacagacagtctcccctctccccccacattcaagattcatctctgctgagctgtgagctctggcttggcagacactgggcctgttttgcttgctggttcatttccaccacatcttggcaggtagtaggtgttcagtaaagaatagctgaacgagcaagaatccttcgcctgcataaaattacttattcagtcacgtctatatgaagcattgaggatacaaaggtaataaaataggtctggtctctgtctgtatgcaactcataaagatgtttgtttccactggagaccacaacttgacaactaaactgtaatgaagagtgaagcaacaccagaccacgtaagtcaactgaaaatgtaaattacctatggctctgtgggtaattagctaataagtttattgccaactccaaaacgaggcaagcgagaggaatggggacaacagcagaaaaactgaaactgattgtgcttagggaagcgggatgctgcattgaagtgtcctcttgtgtggctttggagccagccccctgcttaggctggctgcaccttggtactcaaagcctgtgtcaagatgacatgctctaaaattacccagccccagcctcaagtctgcaagatttcaacagggacttgaaaggagcccagcatgacagttctctgatggagagaacagagggaaagaaggatacacaagcctgtgtcctattcccagcccagcaaacacacacacacagagagagagagagagagagagagagagagagagagagggagagagagagggggggagagagagagagagagagagagaccgactggccatcaccatccctgggcagagcccaagcaattccattctataaagtccagttgaaatcacaaagtctagaatgttagagatcttggacacactcggcacttaacatcctcacagtgtgcccatcacaggagtgacaccagagtttgtcacacagtgaccacacctcctttggtgacactcaggtcacatgaagagtgcatccaccccaaggaaagtgcctatgaactgaggttggccctatagacctcagcacctcacttggcttgcctagcactgtaatccttcagcaggttgttctgagcctcggtgcacccttcaaggctcccaggtattggggtgagggctgaggctatggttcagtgggtcaagcacttgccacacaagtatgagaacctgagtttggatctccagaacctacataaaaccagatgctgtggtgaacctctgtaatcccgatattccaatgcaagatgggaggtgggagagtcctcagaagccagctactctggtgtacgcagtggtgaacaatgagagaaacctgtctcaagcaaggtggaagatggggaccaatccctgaggttgtcttctgtcctccacatacacgccatggtatgagtgcccacccacactcacacatatcaacccacaccaagattttaaaaaagatgaagaatgcattggtatgcaggcaggctaaccttttaacaacaaacttttcactgatggcaccctgtaaaacacagcattatgtccagactgggccatgtgccaaccattaaatgcatgtctgacacaagaaaactaacaccaacttggtaagaattggagacatttcgtctctctgtctaggaagtaccagaacggacttcagtgggtgctgctgcatttgtgagtctctgtgttcaagtttccctgggagaggaactgacgtggagacagactcggttctccagcagctgaaatcgtatggcctcctgctttctggaaagaggggggttagcctgacatgagggcctctaggttcttatcttctcaaagaaaatagttcagtcaagagacagtttaagcagaagtttatttggctagaacactccaaagagagattgtagtaagagagtttgtcctaagatggggcagctgccaagtgcgtctgcattgtgaatttttagatcaatcaatcaatctctctctctctctctctctctctctgtgtgtgtgtgtgtgtgtgtgtgtgtgtgtgtgtgtgtgtgtgttttacaggcagttattagccacctaatataggtgctgtcaaccaaactctagtcctctgcagtatcaaacgactaaagccacctctccagtcctgtactgtgaattttaaggatgctttaatgaatatttatgaggtagatggcatgctcatgggggtaagctaaccctgtttccttttcatcatggtcgacttgattttccttttagggtatttcttcccatgatcctctaggaaagccaacaatagggaatgtggtagcttggatgaggggtcccacacagtctcaggcattcgaacagttggtgcccagctggaggttttgggaggtttaggaaatgtcaggaattgggggagggggagaggtgtcactggacatgagctttgaggtttcaaagcttctcaccattcccagctttttctctctgtctgtggtagccatgcactatgtgagccctcagctccctcctcttcctgctactgctgccgccatccctgtctccctgccatgacagacccttatccctttagaaccataagtcccaataaactctgtaagttgctgtggtcatggcgttttaccacagcaatagaaaagtcactaatacaagtgttatgtaaaccatcacacaggtgacctaatgatgtaggtcttgtacggatggagaccctgtgttagtgtatttgtgggaagatgcttctggaatagtgaggacagtgtagtcatagctttaaggatgtttaaccacagggcaatctgaccacttcattactcctcatttacccagttttgagcctgcttaaggaagacttctaggttcctcgtggacacccttttctccaacatctgtgaaggaggaaggtggaggccagttcctacaatactttgtctccaaaatgaaggacttcccctggggtaggggagtagaaagaagtctagggctcagcccatcgactatgtgccaggcaccgtgctagttacaaacagcaccatagctacaggacaaaccacccagccatgagggccacccttgctgaaaggaagtcacttgtacagacctgacagttgtcacagtgtatgtcctatcttctcacatcaaggggaagcaagaggaagcccaggtatgccagagagcctgagtcacaacatgctaggtacccagactctgaccacctgattttcttacctgccttaaagtccttcatcacccagcagctctccagtgtctgatctcatagcagaggcaaccatgtgcctatgggcacagaacactgctctggtctccatatacatgcacacaagtgtatgcaccagtgctttcatatgcacacaacacacacatacacacacacacacacacacacacacacacacacacacacacactgttttaaatacaaggagtaggaaaccagctagtgtataatgtccaagacagagtaggtacaggattagggactcttctaaattcttcatgttgcatgtgtggttgacttgttctggaaggggcgatcgagacttacaggaggaaggggcattaattatattaggagcatagtattcttctcgttactatcgtgaaatgcctgacaagaaacttgagagaggaagggtttattacagcttacaagtcaagaggattgttccatcatgacagggaagctgtggcttcaggcaaaaagccatagcagcaaggggaggaaggcagcctgaagatagcagagttaacaggaagtagggcggggctataaggcctgagggccctccctggtgacccactttccctaagaagactccatctgctaaagctgacacttcatattgaaaccacaatacgagagggccacatagaaagctgttggaagccactgagtaagaagagaggcatcatgggggaagctcttggggggcctgacaatccctggtgcttctactcaagacatgagcaaatgggcaaagagcagagacagaaaaccctggagggtaaggatgcaaaccaggtaccacctgcaggatgaaggggctctgcaggggcatccactcagaactgtctactcagagctgtagaatctaacagtttataggtagtgcttagccattgttagcttgattcattttagacccacctaggagacacacctctgaatatgtctgtgagaatgtttccagagaggtgtaatcgaggaggcatgtgttagttgcatccctgttgctatgataaaacatgaccaaaaccaaaagcaacttatggaagaaagagtttattttggcctatgggtccagagggatatcagtctaccatggtagggaggcatggcagtgagctgagagctcttggctccaaactcaagcataaaagtacagagcaaactaagagcaggggcagggtactagatctcagatcccatccctggtgatgtacttccagcaaagatgtaccacctaaacctcctcaaatagcgccacctactgagaaccaagtattcaaagcccctagccaatgggagctgcttctcattcaaactaccacattatgagcaatgaggaatgtgagcaactccccatcagctggggggggggggatatgtccccaaaatgggggaagtccccagagtgggggagaaaaagaaagagaccacaagctgagcatcagaatttgtctctctctgcttcctgcttccagacacaatgtgtccagtgctttccgctacgtttcccagcatggtgggctacatcccttctcaaaccataagcaaaaataaagcctcccaccttaagcagtgtcttagtttttgttttacagccataagtgacactatgaccaaggcaactcttataaaggacatttaattagagctagcttacaggttcagaggttcagaccattatcatgaaggcaggaagcatggcagcatctggcagacttggcgctggaggcgctgtctactcagagctgttctacatcttgttctacatcttgttccaaaggcaaacaggagaagactgctgtcttcccggaggagggttgctaggaggagggtctcattgcccaccaccacagtgacatacttcctccaacaaggccacacctcctaataatgccacgccctgggccaagcgtattcaaaccaccacaagcagtttcttgtccatatttattcacaacaataagaaaagtaactgacagtgagccccttggcctcctagccaattttcttcatttcattgatatgtacatttaagactaaggaaaggaaggtacctgcccacttctcagaagctgagccaggttcagagataaggggtactgtcctgtccacttgaaccccagctcctgactgccccccacccccaagtttatcccagaatgttaacttgcctggtgttctcacttatccaggaagcaggggctgccagggaaagcctgctgaacagtaaataaagaaaccagggtgggagaggaaggctcagtaaccataaatctctttagaattttaaaaggagctggggaatattgacacgaattaaatccaataaaacattcatttaattaaactttaaatgatccaaatatttgctgtttggttaatatttgtgtagctgacaggagcagaattacgatggttttgcgggtactcgcgcattctaattttgcacgagtttttcctgcacaaagtctatgtcttcatacatacaaatgatgaggacctcaagcgacaaagatgcatcacccagccactgagccaggagggtcacagaaggttcccactgccctgaccccaagctgtttgccttgtttgtatttggtcctatgttctaggctctaccagaccttttgtggaagttggggccctgggggtcccaagaagaaggggattctagagttcttgttggagccctatccttcatgaaagtcagtactggccgtccagagctctaacccatcagattgcctgcctctcatcctctgctttgcactgcctcacttaagattctcaggcccctccttaccttggaaggcctcacagaagcctcaaggatgtccactatactcacaagagtccacagaggtccaagcagaggggcaccactgtgtgctagttacctagggatgtgatgcaggcatctggggaaatcacagcagagaagtggagctcgagggaccaggagaagccttgtctcctgcaaactctgtaatgattgcttggcccatctttctagtcttgatggaggttgatgcagagagtggtgatccctttagtgcctagcctcacttcttctcccgaggcactgagaaagatgcaactgaaaatccctccgttggtaagcctggctcgtgcctacaattccacacagtccatacgcatggatgttccgggtataaacagagagcttctctgtgcagcttcgtcccagccgccctccaggctggcttccaaggaagaagcctggcctctctcctgctccccctagttctaaccagagggacctccaggctacaaaggtcagccctgcccccatccaagccaaggctcccacaactctaggccactagcacaccttcaggctttgatccagctcacaggatgttgggagcagactgctataggagtgtgcagtatctttcaaagtccctcaggaggatcccttcctctatatacctgggagacttcttactccccatagttccccggggcaaaagcagcattgtctccatcttcttgctcccagagcacagtggtcatccaatgaggaagagctcctttctccggctgagaaccctggcgcctaagccccaaggaccccagagctcagtaggatctgcacaatagttccatcagattctctctctctctctctatctctctctctatctctctatctgtgtgtgtgtgtctgtctgtctgtgtttatctgtctctctctgtgtctgtctgtctatctgtctatctgtctctctctgtgtgtctgtctgtctctctctgtatgtctgtctgtctctatctgtctctctgtctatctctgtgtctctttgcctatctctgtgtctctttgcctatctctgtgtgtctgtctgtctatctgtctctctgtatgtgtctctctgtatctctctctgtatctctctgtctctctctgtatctctctctgtctgtctctctcccttcttcctttcctccttttctctcttccttttttctctctctccctccctttttcttcctctccctccctctttctctcccccctctcttccctctctctccctctctccttccttcctgcctccttccctcccttcctcacccccttccatcacaccttcctccccatcctccaagtctgcagagccaggttcttagtcttgccgcaccgtctgcaccctctctttccctaccctgagcagtaaagctcatggcccggaggtgggagggcaacaggcagaccgtgatttaagaggaaacttgaaatgcaccgctataatgtttgtaaaatattatgccgcccgcgtccgcatccatcacccggtgcttatctctcctcgcactggctccttcactccagtcacatttttcctcagagtgaccgcccctccccgccggcccctcggctcttgagctcctttattttcattttctctgttgttcacccatccatccaacacacgccgagggaacgccttgtgtacagcttgattgtcttcgcaggcccagggcagggccgctaagtggcgaggaagggatgtggctgctgcagatctgaggcacctgcttgcaactcacacactgcagtgctaagcctgcacctcttttctgtcctgctcccttcccccacatcctggcaagagagcatgccgcccagatgcacagcccgaggtgctgccactccagctcctggctcccagcatcccacagagctcagttcccagtttatgctttgtttccaacactttgaaggatatatccgtcaggggatgtatgccccgatgcaatggcatagtgagatagcatagcaccttacagttttgccagcactttagactgcatacagatacacatacccatcccggagccaacctgcctccctggctcctgagaggacatagagaaaaagcaggggacacctgttacatcccctccaccttagcctagtcccatgtttgcactgagcagcctggatttgattaatttttcataaatcctaagagtttcagaaagcctgaggggggtggaaatattttgcatccttctatgtttgcctaaagagtggccagtctccatgccagttagcaagcaaaaatgacaaggattcataatttggcctgcctgaagtacactaagaaaaatacatacatacatacatacatacatacatacatacatactgaaaggccccagtgcattgtcacagaacagaaatccaaatccaagctcagtgaatcttcagacagaaacagactttcaaaggtcagccagttcgttctccagacctcagacagcgcaacctttaaagctacccccagatggacgacatacctgtcggctcaccaacagaccttgaccgtacctagcaggttccaacttcattaagccagagccctccaggcagcatatcccacaactggctgtgtgatttctctgctgggtgtaccttatgggccctggcaaccagtgttttcaagtccactcacgaacctgtggcccagatgttccaggttcctgactggctttgacacatgggacctttctgatattagacatcattataactgatcacccagtgaggatgtctatcagtgtatttaactgtcacattataacccatttctgggggacccaaagcttcctttggccctgcccttgagtgaatccataactgtttacctagagttgggatttgacctctatgtctgcctctgaccactctctcctgtccctctacagaggtgattcagctaagcctcgcccctgaggacaaggtcagtgtgactaccgtgaccgtgggcctgagcacagtgctgacctgtgctattcgtggagacctgaggccaccaatcatctggaaacgcaacgggctcactctgagcttcctaggcctggaagacatcaatgtaagtcaccgagtgcccgagtatgtcctggggatgccaacttgtggggcaccatgtggcagtagtggcagagggctttcttttattaggtccatactcagcctgacagctttagaggatccgagtccctgaatgaaaaggatgtgatgaatgacagttaccatcctgatgatagtcatgtctagtcacaggggatattgactgggaggcacatggccagggcaggtggcacctggcccgggccctgttttaccaaaggccctaagcctggtatctggagaggaatattctgtatgagcatactctcatccctcacagggatgggtcataagctgccagagagcacagccaggcagaaggcttcagagccagagagagatgtagttgcaaggaggggactccctctctctactagatgggcagaagggtggtccctatagaaggcaaaagtgagcagggtgactggctgaagggaaggtatgtgacagatgaggtgggaggtgacaagtgaggccagaggaggcttgctttgaggatcttcttcgtggggtaagtacatgcagattcaaagtccttcaagctacctctcttccccagacagacatgtaggttattcagtcacgagtagccctggcttagcatggaaccaatcacagtgtccaaaggcatttacaaactgatgccaacttcgagagcttctgtacatataaacccatacacccaacatacacacacatgcacacatatgcacacatatacacataccacacacaggcacacagagacatacacacatcactacatgacacacacaaaacccatacagcatgcacacatacaccacacacacaacacaacacaacacaacacaacacagaacacaccatacatactcacatacacattcctcatcagaagagagcaggtgggtgagtttacatagcctgatactggtgtgaccaataggaatacttctgcaccctgaagagccagtgctttgtgattttgaggaatccctgggcctgctgatccctggtaaatgtatctctaagaaagcaacctgggaagcccctcccttccactgaacttcaagaaggtgaacttcaagaagatctaatatatcaaatggtctagctttggcagagggttgatgtggcggcccagacatcagcaatgctacccatgttggggagatgctggggtagctgtgggtcttgggctaaaataagaggagtacagttttcaagcagaggagactgccctggtcttcttgactcaagacagaacagtgggtccacaataggatgcttgtgtcagaaaaggaagactcacgggatgaatggtcagatctataaggaagtagaatgggggtggggaagagagggacctgacctgaaccatgtgaccacaaaggagactgatctgagctcatgagatggtttgccattgctgccattgagcctgtctcatggcagagtaagcctcctatccctggggacatgcaaacacaagcagagactgtggtcaatggtgcagccagcctcaagatgtcagctaaacccatgatctgaagatccttcagtgctgagtctatcatggtgtaagaggtgcagcccaaagaataggtgccattagagtggagagtcaagactctgggcccctctgggtagaacctgcagctcataggagaaacagctagaaaagggtgaccactctggagtttctaagctggcagatccggctaaggaatgtcctcaaccatcttgtcacacaggcagggttatttccctgaggtttcccctatgtgatgaggacagccagtatcctctctcctccatctctgagtgtcggtgaagcactgccctggtgggtgcctggtagacactcaatgagtagaatccttgatcccttcattctctggatccaagatggcgaggctttgcctgagatcatagcaagaaaattcagtgtctcgtgtgtgtgtgtgtgtgtgtgttgggtatgtgagcttgtgtatacagcacctctcataattagcatccattcacaaatgactttggccactgtgactgtctcctcctcgctaggccggggccactggtgactgagtaacctcccgagcattgcttggtgctctatttaaacacatcagaaataaaagcagaggcaaacgctccttagtgcacttgccgtcagttaattaaattactcaaacatgcctccagcaccaactcgattgcatttctccttttcaaatcaggttagcaatttggataattgtgggtgcaaccagagattaatggtccctcgttacctccccagaaacacttgctcatggttgagtaggtagcctgcaaacaggcggcacctgctccacgggggtcctcactacatgcaagcgcactcacacaatgcccacggtggttgcctcctctacatcagggagaggggagcatcacccgctaatgaagaacgtaggccgtgggttcgaagggacctaggtttgagtctcagcttatcacttaattgagtgaccttgtaaagggcccctgacctttgttaagtctcaatgttcctcatctgtgatatggagctaaatgagagatggtacttcccttatagatttacagagacgagatgcatggaatgttctcagcagagactactctatgaacatcattatcaccttcattttcattattcattattattaataataacattattaatattaagttgaccatgtgtggaaaacacccagatcagtacctgatacccagaagggttggcagcagcctccccctccctcccaggagaagaaggaggggaggaaccaaagtcaggccaaagggagcaacagccagatccttagaaagcctggggcatttatgaaacaagagttggccaggggagaacagccagcgaggaccaaagactctaaggttctcagggttttctgagcctctcagccatctatctcagcattcactgcccccgccctgtgagtgctgaaatacaatcaaccgagttatgattaatgcctggtacccaacatggcttccaaccaagggagcggatcagccttccaaacccgaggcagggagattagaagacacaaaagggtgtggggctccttcctttgtcatttgtatgagacatcttgattggcaagaaaatattaatcacttttccactattctcttaatgagacgctttcatgggcaacaaaatattaatttgtcttgtcttatctgttaaggattctgttaatgaattcagtcacagagctattagagaatgccatcctaatgacacatgtaattaaacttttctgacttgcaaacatcaaagatgccttgcgcatcagaataatatttgatcagaaagtcaatgctcctctctagcctggaggcgagcgatgagccgcctgtgttctgcagagagcaccgcaccctgcttgccagtcatcattttagcattgatttgcttacaaagtgccagtgagccgcaaaagccccgtgctggggccctgagcagagcaaagatgctgtccccagcacactgggagggtcaggacttctatgaacacctgttggaagggctgcagaaaggaacggccctgaatggagcttcctgcaaccaggaaaagcaagagagagcagtagaaaggccccagctgtggagagacccccacaaggcctggaatgttaatgttagcagcctttgctgtttccccatagactcaggggagctactgggttttggccacagagtaatgtgaccaaatgcagccgtttcacaggaccagagactttccaacctaaacttgaacgtgtctccaagaagagtcccaggtaacccaagaagggacccagaacaagcgggaggcccatggctgatctcgggtctttcctcctctctaagttcacccaggacacattcagagtggctaccgtggttcctgctcaaggttctcctccatgtggctacggctccattgataggactttcaccttgtcagaaagtcccacctggacccttcagggcctctgctgaagtactgcccacaccagtacctcatatgcatatagcttcaccccaagcagcttataagagcagacaaccccaaaagaaggcacgccacaccctgaagaagcagcagggctgagtgccagccacagcagcccttgcaagaggatcccaggttacaatgtgcctccctctcgaagaggaagtgatggtttccactccaacccaaggtccctggagccgatgacatttggcctgcacttgagttacttccagaccacctattggtttctttactgaaacagctatctttctcctgtgtctcagatctggccccgagctccactcacctcaaccctcggggacctacggctactgtcactgacccagaagctgtcttctgcagtcaggctgccccagagagtgtgttcacactaactgtctgggagaggaagaagaggagaccttgatccccacacccactcccacatccacccccaccaccagcccatgccatgatgcccccacaggctatcccactgtgaacatcagaagccagcagccagagcttcctatctctcttctatccaagtgacccagaaactctatgtcactcatataatgccagtaataggtgtctcccagcagccagagcccatgatagcccatgatagtattcatcctggagggagttactctgcccagacataaggatatcttaggaaacagaaagatgtctaccattttaatgtcctattagaaaggggggaggttctgcagggtctgccaatcctgagggccacacagctcagtgataaaaaagccacattggactctgggatgtgtgtctaagtgtgtttgtgtgtctgtgtgtccgtgtccgtgtccatgtgtgtgtgtgtgtgtgtgtgtgtgtctgtgtgtgtgtccgtgtgtgtgtgtgtgtgtgtgtctatgtctgtttgtgtgtgtgtgtgtgtgtgtgtgtgtgtgtgtgtgtgtgtgtgtgtgtgtgtgtatgtgtgtatcccgcacagaagccattttgctttcttgcctagatcacaagaaccatgtctcacccttccctggctagcttgtcctgcaccctcccatctcctcaagctcagagccaggctttggggctaagcctggtccatgtcaaaggcagctagctgtatatgttaccccccagccccatgctgggcatccggaggcagggggttggatgctgcctcactgtctgcacaaagcaagcatacaaacccactctgggccacagtcttctggttctctaagcactccaggctgagtgagggatgccccgaacccagactgtgtgtcactgcctgaatagtgtcatgtgtcctttaccccatgactccttcattctccctgtcacccaaagtgtcatggcacctgcccaatgaggggacagaacagggacagggcatccctaaagctgcagatggtaccagatcagcagaatcactgagtgttggtgtatttttcctgtggactcccagctgctcctgccttgtggtaactaacaggtaccggactggtctcttcgcagcaactgtatccctcctcagtactgcataaggtgggcagggttaaacactcaaaggagcttcctgggggcctgtagccagtctgccacccagtggcactctttgggtttagtaacaggacataatacttagtgtctggcattgccatgccctggggctgcctctggctgcccccttcccaacctgcttaaggtcctgaggtccgccatctgcatccacttggctgtgaggtcaggtatgaggctctgacttattagctacttccctctggccccaatgaggacattcccgggaggaaaaaaaaagtctacgtgtgtgtgtgtgtgtgtgtgtgtgtgtgtgtgtgtgtgtgtatctaaggaccaaacccaggaccttgtgcatgcttagcaagtactgtaccactgaactatactccctgtctctcttagattcttctctttaaaaaagaaaaaagtgaggagaggggtgatatgggatagcaaggtgcctcagtgggtaaagacgggcttgctgccaagcatggtgaatcattgcaaccacgtgctaggcagagataaccaagactctcaagttaacctctgcccttcacacctgcactcacctatgtgcacaccaacacacacgctgtggtacacacacccgtatccacgcatatgcctgtgttacagtatacaggcctgcatgcacacagtacacacacccgcatacacatatacttgctgtgaaataaataaatgtcttttaaagattttaaagacttatcacacgctcagtatatttcaaataacgtaaaagatccagtctttattcagttgttaggtttgaggtttctgtgggtttggctttttttttttccttcttcttttcttttattttaactgaagctcactatttggggctttcaactgttggcaggcagagtacagtgataaaagcagtgacacaaagcccactagaagcaagtgtctgtgccattgtttgaagggtctgttaaaaggttcccgttcccccatggctaaactgtgtaaaactgagaacaaatatttctaatgaggcatgtgcttggtctctccaaatgtttctttggaagtgagttatttaaaaaagaaaagagaccaaaaagaaaatgatttaggaactcatgactcatttcatttttattgtcttcgtatgaagcagtcgtgaatgcactgtggcgtgatgcgaggcgtttgattagcatggagagctgtttgccacacggcagacagtagctgtcattctgcattaagatcatctcattaaactcctgggtacattttgttttaaactcttggaaaacacagtgcttgaaggcggggccagttctttccagcttgggtcacagaccctggtggtatctaaacctcctgccttttttgatctttgggtagattcacactattggtgtgttgtccagattgatccatgggctggggatgtgggttggtggatggactgtttgtcttgttatgcactgtttgtgcataacaaagtgggttcaaagtgggttccatccccagcactgcgtaaacagggtgtggtaaccgtagctcataggcagtagaggcaggaagataagaagttgaaagtcttctgtttgcaagtcagaagccagcctgtgccatgtgagaccttgtattaaaaagagaagaaaaggggcagtcatggaggccaggtttcaggtctgtggtgtgccaacttgtggacatgtgggtcgactgtcccaagtgcctcctctggcattggatccctgggtacagtcctccagttcacctgttcctctctctcagtactgccttcagtacctgactagaccctccatgcagagcccacagactcactgcccagccagtggaggaggctgaccagtgtcccccttggtcactgcaagttggagccaaaggatgctctccagagcctgcagccccaggaccacaccagaacagctgcctgccttgccctgtgccccacccagagtaccttcagtgttgtctctttattactttgtgttgactttgtccactgcccatgctgcagccctcatccagatacacagcctcatatctgctcaagtctgtaagggaactttctgggagaagcacatgttcagcttggagagggtttgtttgttgtaaattaggctatcctatagctcaggtagctaaggttacccttgaacatctgatcttcctgcctccttccacctcctgattactgggatgaccagcgtataccactacccttgcaaaaatggaaggggtcaaatccagggcttcatgcatgctaggcgagcattcgccaacttagtgagaccctccccctgacattttcagtttgcaaagatattattactaactctttttccaaatgggttgtactggtttatagccccttccaacagtgtgtacaagtttttagtaccaggtcaagggggggactatcctgatcaaaaatctcttagtccctaccaaaaaaaaaaatgtaattaaaaaaaaagtcatcttggaatggtctaatgacattagttggctatcgtggaacaggttggaatcaggggttattaccccattaagccttctcagcctggggacttgtgacccaagtgcacttggaggaggaattccttgcagatgaaaaacaattgattcaagtgaatctggggcttcagttgatgctgtcatgcacatcgtgatacccaagtcccttcacatcccttgtacactctgacaattagccatggacccaaagccccacttaggggctcaggtacctggtcatagggcccaacagctgccagttatacctcatgacactccaaccagaggagtgttatctgttctctgagaataagcaagctcagagcaacctctctgaggagcctccagtggcagggacataggcacatgtatacacccagatgttcacatgtgtcccctgtttatggctttccagaacccagaaaactgggccagaacctcctgtgtgagttttataccaagttaaggtgacacagacacgcatgcacatacacgactaaaaccagtcctaactctggggttcctaaaccagactcagggtcagtgatttgcgagaaggattcacagaacccactggaagctgggagcctccaaggtgacagtttccagcacggaaaatacaggagtaaatctgtcagaagaggccatcaggagaatccagagtttcaagcaagctgcctcctgaggcccttcccagtgaagccccagatgagctgttttctgtcatcaggatacactagtgtggccagtccttggtgtccagagatctttctggagcttcatcataacctgccctggagatgactttggtttagcctgcaacccctcaggaagcaagatagtcccccacttggcctgaagaccccacataaacaaagattcctaagaacactctagggacttaggcgccatctttctaccgaggaggtcaagagttagcagtttctttgagtggtggaaaatcttgatggcatacaccataaggaacagcatcctaaggtgcatgcctccctccagtcagctgtcataccagagttcgttatgtggcatgaaccccttcctcagctcaccaaggacaacacagtgatggagaaatatgagatacctaccttctttgagctcacagtcaaggggcgagtagtcactcaagccatccggtgaccacacataccccgaggtcttgaagaagctgggaactttccttccagaaggaggtgccttcttacgtacctctgatcccctttcctggtcttgaacctgaaatgagcaggacaacccacgcctgggagcctggggtgcctacaactgcatagttaccctcttcagtcttcagtggccacccagaatgttgctgcaatatcctttaaacagatcttgagcaagagaacaggtttgacaggtctctgcagagtgtcagctctactcttggaggaactgggagaaataagacaacattcccccccccccacataagtgaccggctatagagaactggtaggttggtgagtgtgtgtgtgtgtgtgtgtgtgtgtgtgtgtgtgtgtgtgtgtgtgtgtaggacagcggataacttgcaggagttgattctttccttctaccatataggtcagatcatcaggtgtggttaagggcttttaactactgatgcatgaacccaccccttgaacttgaacttttaatcctgtctataattccagtgccatgccaggattatagatatacaatactatgccctgttcatgcagagctagggatcgggctcagggctttttcatgttcaaaacatgtgtttgtagggatgctgtatgtttataccaatgcatgcatgggaactccaattggtctggatactaaacatgtgattcttatgtctctgagtattggctaccacacgtcactctcagtggggaacatattgactagcgagataccaggacgagtgatattttaggagctagaatcaagccaatgtgaaatcagacaaccctgcttataccctcttccccgaagagagccagggggactctttgggtttgtatgtttattagtgctttgtctttatgtatatgtatgcactgtgtgcatgtctggtacccaggagaccagaagagagtgtcagatctcctggagctgcagttagagatggtggtgagctgtcatgtgggtcttgaacctggatcctctggaagagcagccagtgcttttaaccactgagccatctctccagccccctcagtgacgcttcttggaagagcagggttgggacgttctgagtaaatgtctccaagctgagcttcagcttgtaactttgacagtatggttaagctgaactttagtgtcaccctggagtcctcgtgtttagtgctgagtcaccagatactcagccttggtggctcattgtggcattacttattcctgactctagtgtgtcactatggaagcatcccccacctcctctcgcttaactactgtttaatactgaagtctcatctaattactttctctaataagggcaaatacttagaaaatcgctttttaatagacaaacatcatgtctttaagtaaaattgtctctttccccccaaaatggatgtgcacccatacaaagaatggtctaatctggcatctgtttatttctggaaggaactttgattttgctaatacatttctatgtatcagaggaaaaaagctatccattaaaaaacaattacagagatgcaatcaagcattgatagcagtattcagacacatctcaggaagcattcagaagaggaaagattgcaggcttagttttatgtagcttcttataaatcaatgtttaaagtaattctctcacatccaatgaggtaatttgatttctgcagccagtattcatatccagaaaacaatatgcatttcgttctgtaattatatgatgtctattgttttagcctagagagattattttatttattacagaggcgggctctccctgagctgacaccacaggcggcgatgtgctctgtacttaacaaaagagctgtgaagcatctggccagctctctggtcccctccaggctggtacagttcctcccactggctcactactccaggagtatgctcctcttacaggaaacaaggacttgttcttgagaggcaagagaagcaggcggaggctaaagactctttcaggggtgcacagtcaacagtctggggttctgcacagggatttctatctgctgctgccctgagacaaacctccagtctatccttgaaggataagccctgacctggaggatgtagaagcactgagtccctcggagggctacaccacagagaagggttaggcagggcgtgggaacagaattatacgggaggatggctcagtcagcaaagtgtctaaggttgatgaggacctaagttcaacccctggagcccatgggtgaagccacatgtggagtgtatgtttgtcatcccagcgctgggaaggaagaggcagaaggatcctggggttccctggccagctagtacagccacatcagcaagctgcaagccaatgcagagatccttaggtgccgccctgtgtggacctcttacccctatatgtatctgcacgtacacaaatgtacatatgcacaaatacttaggaccaatccagttgtccttctgccaccccctttgttgtgaccgatcccacgttttgaccttgcacagctaatcaacacttaatcagatatgaaggccagagtgggacacccagactccatcccagaaagtcagaatgcgactgtaataaacaccacagaatgtgaactgctggcttcagctctggggacacagcagggaccacagagtctaagtgtcccctcctccttgtgcagcttaaattgagtgggtttcacaggtggcaaacatagtaacaaggcattgtgatgcagagaagagaagaaggggttggaatggcagtcgggtgagaggtgagcacccttggaggagatagagataagtgacagccttggaaggacagggaggacagggactgcaagtggaagactccagtcatcctgtaaaggatgggcaggcacctaagacaagggcagagtgggaagccatgggagggccagggcagcattgtcactgtcccccaggccaggtgaggatgtgcgccctctggcgtttgcttgaaaaaaacctgttctgtgggaagccatgtgggtgagcacactgcagggaagacaggtagggggtctctgctccacagatgagaccaaggtggctgggtgcagggtgtcacgatagaggctgtaagagagagcaggtgttttcaaatagatcctacagactacccccatgggactgggtgtctgtatgtttgggcattttcccagaagataaaactaggtgatataaatttgagatgttcaagtccttcatataaaatgggacagcatttgcaggcctatacatacccgcccctgaaccatctctacataatgtgtgtggtgtggcatgctgtagaggctagctcaacagttattgtgttatactcttcagggaatgttgacaagtctggacaggcagcatttttcctgactattttctctgctaactatctctagatatagaacactggcaatcgggcgtggtggggagctagccactgactcgagtaacctcttgaattctgtgtgctgacgttaatggggtaccactctcaggtgatccctgggagtttgactttagacagccacctcacctagacaccttctaagcctccaaaatgctgtgacatgggtaactagcaaccctgacaaagtggggaccataggaagggaccactggagcctaagattaccttcaaggactctaaaaagactgtgacgaggagggtcaagaaaaactcaaatggagctgggcgtggtggcgcactcctttaatcccagcactcgggaggcagaggcaggcagatttctgagttcgaggccagcctggtctacagagtgagtttcaggacagccaaggctacacagagaaaccctgtcttgaaaaaccaaaaaaaaaaaaaaagaaggaacaaaagaaagaaagaaagaaaaaaagaaagaaaggaaggaaggaaggaaggaaggaaggaaggaaggaaggaaggaaggaagaaaaactcaaataaccctgcactagacccagcaagtggctctggctctgagccttagggtggagtctgactgcatctgaccatgtggagcattgagtttccctccccactgctccccctaatgatgagctacacgtgccctaacacacacacacacacacacacacacacacacacacacacacagaaggggctgcaatacacttatattctgattcaggaaacagacagaaatctgtcatctcagtattgatcagcctttagttttttcatcagcaactcaggggtgagcccttagggctgttgtgacacaggataagtcagctatctgctgtgttctttatggccgaggcttctacggaacagtaggaatggactcttttaagcaaagtgatgtttcacagtcagggtgcagcattccagaagcctccaagatgagagcatggtgagccattttttttactaatttggaaagcaggagccatgttcactatcaaccttcctgtcactattttgtgcctttctctcatccctcattgagttaagttagcccaaaagcatcttttttctctttctctctctcctttgaaatatgagttcttatatcccagactggccttgaatgtgcaatgtagctgaggatggccttaaactcctcctcatacctctctgagactctgggtcacttcctgtggaaaccctgggaatggctggcgctctctctccctggctctcgctctttttctcactctgtgtgtgtgtctgtgtgtgtgtgtatgtgtgtgtgtgtgtgtgtgtgtgtgtgtgtgcacgcgcaagtgcctacctgcctgtctgtctgtctctgtctcgtcctgccttgctctctcaccctgccttgttttggtttgatttgttcgctgttcctatcagtctgtctctcttcccttgggtgactctgaccccataagttacccatatgcacttgggatctggatggaattgaaccctggttaagcaaactggagtccgtagatgccgccaaacacgccacactcattcatatgcatgtcttctcagctattatcatgctatcatggcagagtcaaggggttgacagaaaccagaagactggggaggctgacatggttcctacctagccctttaagaaggtttgtcagccctagctctcaacaaggtcctccctccagaatcaagccttgtaccaggtgagcgagattcctgtgaaacaagccagcgtctccaggacctaaagggagttggaggcggaagatgtcacggaggtgacaaaggaggaggtgccagggagggaggtgtctttcctggaaaactaactcaccggctgtccagtctgctccacagagaagtgaatctcatcacgattcttttgccccacaggactttggcgaggatggttccctgtacatcaccaaggtgaccacagtccacatgggcaactacacctgccacgccttgggccatgagcagctggtccagacccacgtcctgcaggtgaatggttagtaaatggctccatgcatgttgtcccctccaagcaccctccacgcctctccgagcaaacctcatgctctcttgcattttgtcttgttaaaggcatacgtagcccatctgctgtgatgaagggaaaagcttagaaagtactgggtctggtttacccaaggcttcctccagtgaaatgaatccaagtgctgggggaggggacttggggatgagtgagtcacacagccaagttaccctgggcttctctgaggccccagtggccactgtgaagtgtggagcctgcgtggactacaggcagcatgatcccttgatctctggatctagggattgcagaacctgcgtccaagcaggccaccaatgctcttacaggtgacgtgacaccacgtcgctgtgcatctaaggggcattactcctttcagcagcccttctcccacagggccccttgagcctcctcctctcaggctgtcagagaagattggcaggtttggaaggatccttcaaactcactcaggttccagtgttgccagccatcttgaaagctggaaagaactaacccctcctcactacccctacccccaccaagcagttctgcaagccagagtctatgagcctgatgcatttgtatctggccctgaaataagcaccttacatagactctcaagcagacagcctgccacttgcctggggccacataactgtgttctggagtgagagcctacctctatgacacactgctggtcatctcagcctggccccatccaccatcaaaataagccccattttcctatcctggaccattagggcaattagccttgtcccacgaagcccagctgttgccagcgggcctggagcaggctctggggcatcagggaagagcgagatgttttcaactctgtccccaaatcctcaatgacagcaggtgcttgggacatctcccagcagaaagtgaatgaggtgtcaagagtgatgacatcctgagattcaccttcactgacctcaaggattcagggtgagcagcaagccatctggggaggctgggcatcttcagcttgctctctttaccctgatggtcctcagaaccatgccctaattgttgaaagattcgagagttctctcctagctaaaagaagggccattgacacagtcgggagaatatgctgggagctgggcactttgtgattcacttcctactttattgtatggcctgctggatgacttctgggctggtcctgtagggcattatagttcctggcactccagaaggcagttggtgtagcactcaacgccctcatgggatcacctgaagtagaccctgttattgtccccaaggaatacaaggtaatggcctgctgaccccagaaaaaggcaggaagttttcaaaatactacaaaggttaaagttatatcagacttggaaggaaccaagtggaatctatatggaaagacaaggaagataggatgggctaaaagctataattaaagtgggaacatttactggatatctactgtgtgccattcctatcttacaagacaagccgggctgtagtggtgcacgcctgtaatcctagcacttgggaggcagagacaggtggatttctaagttcgaggccagcctgaagtcactaaaggaatcttccagaagtcagtctacagagtgagttccaggacagccagggctacacagagaaaccctgtctcgaaaaaccaaaaaaagaaaaaacaagacaaggacactgggactctgagaactgggtgacttgcccttacctcacacccacacagttggtagctacaaacagacttgataataccctgggccaatgactactgggatgctatgatgctgcccttcgataatctggatgtagggtatagagtaggcatttgtgggtctctggactacatagcctgaggaaacagagggcaagagccctgtatcctgtgtctccaagcctagtgcacatagctaggtgtcacccagctccccagagggctcagtgactcctgatgttgcatagtttccaggaaggaggactgggtcactaaaggaatcttccagaagtagaaggacaaagatctttgtgggctatggcttgacgtttgtggtggtttgaatatgtttggcccagagaatggcactatctggaggcggtgtggccttgttggagtaggtgtatcacggtggtcatgggctttaagatcctcatcctagctgcctagaagccaatcttctcctggcttcctttggatgaagatatagaactctcagcacctccagccccatatctgcctagatgctgccatgctcccaccttgatgataatcaactctaacctctgaacctgtaagccagcctcagttcaatgttgtcctttataagagttgccttggtcataatgtctattcacagcagtaaaaccctaaccaagacagagattggtaccagggactggggtatcactgtgatagacctaactatgcttttgtttagaagaatgtggatttggggactttagatttggaagcagtggaatgcttttagggggcttaatggactatcctagtaggaatgtggaagactttgttgctaagggtgatttgaactgtggaagcctggctctagaggtctcagaggagaagaattttaatatgtggctgagagtctgttccgttatattttggtgaagactgtggctgctttttgcccttgtctgaagagtctacctgaggctaaagaaaagaaatttatattcattgtactgacaaaggaagtctcaaaaaagcccaacaaagactgttctctggttaagtctcatgaagagcattttgaacaagtgtagcaagcttagaaaggaaaaacataaaatgtatagttgaaataataaaaggacatgagaaagtgaaatggagctgaaacctatgtccaaagagataaacagattaagggggtggtgactttgtgacaagatcccacccagctaagcttattgtttatatgtttgttattgaacaaggaacagttagttatatcatgttgagtgttattattacttggttattgttttcacttggatatttaatctggaatgaactacaattcagtaatgaaagacacagatcttttgatccagatcttgaggagcagtggtcacgaaaagcttaggctcaggcatggtggtacacacatttcatcccaggagacaaatcaagcagatctctgaggtcaaggcaagcctgggacagagcacattctaggtgaaaaaaaaaagcttaagtccagccgtggtactacatgcctttaatcccagcattcaggagacagagccatgtaaatctctgagttcaagatcaatctacagagcaaattccaggacagccaagcttaggcagtgatggagatgaaaacagaaagctagtaatagaataagggggttgggggggtggcgtgttccagacccagcaagcagagaactcagcagctccagccatgtggctctggctttagagtcaagaatatatgggactactgggacaattgatgctggttagctggagctaagaatttatcagcaattaaggagaccagcattattgaggtgataccttctgggaagtgttttctgagatcataaagaagctgtgttccaaagatagccaaggttgtagctgtgcttggtaatgtattagagtcatccaggtggtactggttttgaaggcatgaaggaatcatgaagagcagctgaggcttgacactgtgagaggccgtggaaggtcattggtgaaggtgcagccttagttgcagttgatggccaggcttgaaggggtcatgcagaaaagtagaggcttggcaccatgaagagagcctatgaaagcctattggtaaagcctagttgcagcagaagaccccagagtatttgagatgcccgtaccatgaccatgggataatcaccaagaacagttgcagcagtggagtggagtcaaccagaacctagagcactacagagggtagtcacctaagcccttggaagagcccagatcaggtgtggatcccagacattgaaacaagaagctgtgaagttaaagttgccttggagagccaaagatgttaaagatgccagagccatgggatacctgctgaggaaagctgctaacagggaatagaaccagccctgggggaaaaagtttgttgaagtcaacaaagatgaaaaaggagttggagatcagaagaccactttgacatcagacattgagatgcagagtttggagtttgtccagctggtttcctgtcttgctttgagagttacagttaagtgattagataaatcacagaagggactttgaactttggactttttaacattgttgagactgctgtagactatgggaacttttgaagttaaactaaatgtattttgcattatgctatatttaggtatagcccccatagactcatatgtttgaataagcctatgaaggccagggagtgggatgtagtggttggaatatgtttggcccagggagtggcactatttggaggtgtggccttattggagtaggtgtgtcactatgggagtgggctttaagaccctcatcctcactgcctggaagctagctttctagcagccttcagatgaagatgtagaactctcagctcctcctgcatcatgcatgcctggatgcttccatgctcccaccttgatgataatggatttaacctctgaacctgtaagccagccccaattaaatgttgtcctttataagagttgccttggtcatagtgtctgacagcaataaaaccctaactaagacagtgctgaagaagggaacctctgtgcaggacactagaaggctaggagggtcctggtggttctcagagggctctctgacttgcttaagagtcttctgaaaaaggagaggatatgggtagtcacattggcctgtcattttcaccttccccccgccccccagttgagggtatgaaagatggccctgggcagctagggtgaagtttggtacagctccacagctgtgctgttggaggtctggtttgatcccttccaggtctggcagtaagttgctttggaaaaatacaggatacaggacaggcagacttgggggagactttggatttatcttaagccacatttagtcatagtagacattaatgttcaaagctagaggccacttgcaggacctccagtacattcattatacagatgggaaatggaggcccagagaaaattaccccacccaaaaacaggttgtttcccactagagccacgctgctctcaagctgtttggtaacagagattcccatacacagagtgggctaccttttgggatccccccatttctgtggcagcctaacctagctgcataaaggaacccttccagaaagctatacacaaattattagtataacttccctatagcccaggcttccagagaggaggcccccaaactgacatgatttataacttcctgcaaagtccctgcattgctttcatgggaaggagcgagaactttagacatcgatgattaatccattaaattaaaaataccttcgacctccccacagttcagacaagtagtgattcatcccccaaacacaataatcatcttcaaatctgcttattactccagcttggtactttagtgatttcttacttaagaacatgtttataccgcctaaaccttggcaacgagagactttttccaaagaaaatggccttggtgctatggatacaaatggagtgtgggtaggtttgtgggtgtgggtgtgtacacctgcatttggaggccagaggtcaacttcagggtcgttcctgcgaagacacccaccttactatttttgagacacagtctctcactggcctggagcttaccaaccagccgaggcaagctggatggatggatggatggctggatggatggctggatggatgtggatggatgtcaggccatccagagaaccccagggaccacctacctttctcctcctcttggcttactggggttacaagcatgaaccaccacaccctgcctttttatgtgggttctgtggttggaatccaggtctttgtgtttgtgaggcaaggcactctaccaattgagctgtctccccagcccctgaatgttttcatatgaaggttttacaatataaaagaaaatatctttgtctggggtagcttagtttcgtaatctttttcatgtacagaagatgaagggtggggactaggagctgggatatgcatgacctaggacagttgtgtccttaccatgctactgaaagctggcatctgcattttgctctgacaagacccatgtgagtgcttcacagcctagggttctcctcaggacctgcctgttccggtagactctacagagctggcattaggtatggccaaatcttatggctgcagggatcagggctgggtgggtgcagacctggtgcttactcagagcctggcccacacccatgggagaactgtttggttttctgaatgcccacccaactgaactgtgattttttttttcaattcctcacgctagttttatcctcaacaaatgctgaatttttagagcaagacagtatccttggcaaagctgcctggtgccaagctttgccttccatgttgcacctcaggatagaataggagctgaggaggccaaggggcttctggtcctgcctctacccaggtgcccaggatagcccacagggcatgtgtgcacctcacacgagtacacacacatgcacacacacacacacacgttggtgataaatgacctcgctgtgctctgtcactccactctacctcagctactctgggaggatgctgagaagaactgacccactggctcatgaaggatcgtggcaatttactgttcccatgatcccaaatacccgaatgcaactcatacccgtggtttgtattccacacacagacacactgtagtccagccagccaatctctgagcctctttggctacacatcccaccccctcatcccagcttcaccagctcctcggcttcccagagttgccctcttaacttcctggtgtgtacttgttctatttattgagaaatgtgcgtttccccacccccttactcactatatatctcccagcccattcaacaaatcagcatgctttggcgtgccctgtctgcgtgggggcgtggccatgggcaaaaaacaaaaaacaaacaaacaaacaaacaaacaaacaaacaaaaaaccactaaggaagaagtttcttaaagaacagaaggaataaggagaaccagagtaaatgtgcatgatttacgtaggatggcaggaaaaagatggagagaggggtgttaaaagggggggtgtcaaaggtgaccccaaatgttctggcaagggaagtctgccctttactgaaacaagggtaagccgttgggggaagacagatcatgaactcactcggccatgagcaatgtgtggtgtccaccgacagacaccctgtggagtggggtgcagatgggcatctaagttctctttaagggcaaggtctgagctggagggatgcatttcagctgtttcgggagacagatgtcaagtctgtggatgggtttgggccaccagagggtggagacctgcattcagagccagggctgagggaaagccagctgagcaggtgggagaccaatggaaacgaggagggatgcccagggccaggcagagacagcagcctacaaagatcactcagctgcgtcgtgcagtgcagacaggccggggcaatgattacggctgctgaggtgaagctagcatgtggaagccactgtgacccagagaagagcagttcccactggatggctgggtccatgtggctggaactggcttagaggggactgtgagatgatgtaggagaaaaggggctgggatggggaaagaagatagagagaagagctgcctcattttggggggtgctttagagtcactttattctctttaggagagaatgaacagattgtatgatctgaatggagggaagtccctccaagtagaagcagaggaggagcagtgggtgttatcctggaagaggaagggcaggatccagggcttgggctaagcagagcaaacagggcagcagtcctgaagtccagcattgttgtgcaaacaaaaaataaaagaccaataggtcaaaggtacagcacttgctgagcctgtgtgaagccttaggttcatgcactgaatgaatgaatgaatgaatgaatgaatgaatggattgaagaggaaggggctgtccctaggaagctgcaagagaagcagtgtcctcagaaaaagccaggtctccgggggagggtgacaaacaaaggagcttcattgtggggagggtccacaatgacaacttgaaatgatgtcattacaggggacaagaaaagagcctggtgggcctcactcagaggtctgaagaaagctgggaaggagggaacagtagatgtcccctcctcaggctcccttcaaggagagttgctgtctccttaaagagacttccagatgggcagaggctctgtgtgtgtgtgtgtgtgtgtgtgtgtgtgtgtgtgtgtgtgtgtgtgtctgccctaccttcccccacacacacacctatggagattttagtgctttgaagtgctattttgttgagtgactcatcctacacccttgactttcagtcaggtatctttctgttctagaacactatcacaaatttcagtttaaatttagtcccaaattggcctgagaaatctcccatctcagagaggccctgggaggtgggggccgggaacagggcgagcattgtgtgtgagcagatagatgttacttgctcaagtgtgaaaaattctcagtctacagcacatgcctgccagagatgagagcagagaccaaggccagtctccagggatggtactgaccactgtgggagccagtcctgttccctggacgagcttagcaccaataaacagacagatcctgcagacaccttggggtttagtctctcctgtaggaggagaggaaggtaaagcctctgctccccagggctccccctggggggtgaccatcgcactacagctccttcagtcttctttcccacacagaaagctccaccacccaagggaccgaggctcttaatgctgtgtgcattgtgcctgatacccggctggtctttctactgaggtcagctacctgacattgaattgacagagccttgtaaaaatcaatcaaggtctttagtcaggtgctaggctcagagaagaggagaccccctccccccccccctgcactcagtatcgcaattgctctgtgacatcttggtttagcaaaatgacaaggaacaatgtcagttctcggttcccttggccacgcactgaattgttgtttcctttctagataaactcagcattatttttgtcaagccccaacggatccattttaattggaattggatagagtctgtgggttaatttgtcagatcttgtttgtgacaatggaaaatcttcctaatcaatggctcgcctctcattattacctttcttatgctgtcactaagattttacagttctcatcacttgggtccaggctgttgtctgtctggtctattctgatctataaataagctatttactttggatgtttggtactagctccttatggtcatgtgatcttaaccatctttttttggcttgtggcctggagtgcagctatggaaaacagccctgttctctattatatggttgcgatcttgaatgtccctctgagagactggagacatggctcagcagttaaagagtatttgcctaaggaccaaggtgcctagaacccacagcagatggctcacaacctcctgtaactctaattccaaggggacctgatgccctcttctggtgtctgagggcaccatgtgaacatagtgcatataccaacaagcagacacatatggacatttaaatgaatatgaattgtaaatctttttaattttgaaatgttccccatgagtgttttgaaattttggtcctcagtttgggatgttattttagaggctagagaccccttaggaggtggggcttgggttatggaaacaggtcactatgtttctgttgaaggctctgaagtcgatactcccttcaaccaaccacattctctgctgcctggttggtcacagtatgaagagtctcagttgtaccagagagagagcccctcgaatcaccatgccttccccatcatggtataagctgagagtccttcagttgtttctgctgggtgtttggtcacagggataaacatggcaccatcctttaatgtctatgccttgatatcttaccttccttgaccacacccctggagcatcagagttaacactgcttcctgtactttctcagttttgaatttcctgaaaggaatggtgttgattcttctttttatggacatactcttcattgtaggaagaaaatatcattttgttcctatttaccgggccttgcatagtcacacaccaagaaaaggagtttaggtctttttcaaaggctctttcggtatctagtaagaaaatcaagtgatttatttttggccacctttgactttgatcattatagatatcctaatagacactgaaacatacttagagtctgcggctatattttatgtgtgtctgcatgtttgtatggtcatatgggtgcacatatccctcagcacatgtgtagacatcagaggacaactttggaggttgtccctcacacctcaccttgctcgaggcaggcctcttgttcactgatgccgcccatgagcatctggggattcttctgtccctacctcccatcttgcctggagagagatggaattgtagatacatgctactgagtccagctttctacatggatagttgggataggaacccagatcctctcacttgcacagcaaatactttgtctatggagccatctctctagcccagtgtgttcttgaaatgccagctagatgttaccaactgtatttatgatcctgatttgcataggactgtggtggtttgagtaaaaacagcacccataggctcaggtatttgattacttggtccagattggtgtaactgtttgagaagaataagccttgttggaagaagtctgtcactggggggtgggctttgagatttcaaaagcccatgccatccccagttagctctctccccctctacttccaactcctgtgtaagatgtaagctctaagctcctcctccaagcccacacctgtctctgccttgctgccttgctccccaccatgaccatagacccaacttctgaactgtgaacctcaaagacttttctttgttctgtacattaccttggtcatggtcttcatccaagcaatagaaaagtaactaagccaagggctgagtgagacagtcacaacttattgatttatatatctgagtcagctctacagacccaaagcttccttttaaatgatccatttcattgaggtctttgtttttattacccataacttaatacagctttctcgcacgctcaagcccctttgtattctttttctcctgttttcaattgatcaaacttgctgttcttacaactaggcagctcaaagatttgctcatcgctctcttggctttccaggtgagttctctgttctacttctacctctgtggactcttctacttcctgtaggtttgatctgtggttatcaggcaggtggctttgaataggtggagatttttgcaacagcacaagctcactaatgcctaggtcccaggtagtcctaactaaaaccctggtttgttctagaactttctcaaaccacgcatcagtctcagttctctgggcctctataccctccttacccaaattctgtgcctcttgaaccccatttcttcctctgcccaatgtaaggtgtgagaaagcttcctttcctatatgaaccaaatggatggaagaaaagcttacatctgtgttcttaaaagcaatccctgcccacatctcaactggacccactcacctcctccatccttgatggttgatctggggcagaaccatctttgatactgctatagccagggactctatccccagaactttgaacaaagagacccaaggggagagatggcagagacatcttgctcttgggattcccctcttccctcccagaggtcagtcagggcaagccttggaacttgagctgagttgttaagaagagtgtctatggtggctggagagatggctcagcggttaagagcactgactgctcttccaaaggtcctgagttcaattcccagcaaccacatagtggctcacaaccacctgtaatgatatctgatgcccccttctggtgtgtctgaagacagctacagtgaacccatagaaatagcataaatacatctttaaaaagaagaagaaggaggaggaggaggaaaaggaggaggaggaggaggaggagggatgtctatggcaactgcagatccactgctcctaatgactctagagtttctcctttgtcctctgtccactgagcgtggaccaccagagtgctcccttactcagactcctccttgtaataaacaaaggaacttccagatagtgctaagaaatcgtagttatccacttcaagaggaatccatccaccaaaaaaaaaaaaaaaaaaaaaaaggtgtgatttgtttaaaacttgtttatttacatacactctcaaattctgttttacagtatatagagtaaaatgtattaataaacataagccctcgtgaatgtgagaaatgatggtgtttttacttccagggacaggagagacgattcccccaaaatctccacttctccaagagtccctccccatggcctgctcttgtaaggggcagtgccctgtagaatgtgccggagtcttgcctacctgtggtcatctagccagtgggtcaggttatatatatacccaagctgaaactcaaccaccaggggccagagctgagttgttccccagccaaggaggacacagccttcttccacataggttccagagcttagggagtgaaggaataaaaatgacccactggaaaatcgatgggcttccccagagctgtgatgtaattagcagccctgccagtcagtgcccataagtgcttcgtgaagcatttcctgaaagaaattaaggccctgtccaatggctttccgataacaggaataatacatctgaatttcactcgttcagagattaatttcagccgctggcttctctttacatcctgcagctgagcagtgttaaatatttggatgtctttctgatcatattgagaacaagggtggaagccatgaattacggggtacgacacaggttgtgtttattactagtaattcattttacagcttttttcctcagtgcttgggttgtcaaagatgatcactgtaaactggttccactgcctccagagtcgcctctcaggttcaccctctggatcaagggtctcgggggttgactacaggcccaagagcaggtgtggatttgttcttaccaacactgattctcacccacagtgccaccagtcattcgtgtctatccagaaacccaggcacaagaacctggggtggcagccagccttcgatgccatgctgagggcatccccctgcccagaatcatttggctgaaaaacggcatggatgtctcaacccagatgtccaaacagctctccctcttgggtaagatctgcatgtaggaaatgaggggcgagatcatagctgaatctggcatgttaagaggaaacagggatcccctgttgattggcatacacagctcatgggcatctgagaggcaattggccagattccaggtcaccctctacttcagcagtgctaccccatcctgggtctagtcccaagaatgttggctgccttcagccatacccaatgactatggttttagctcaaggctcttcagagatcctgagaggatagtgggagggcacatgaaaggatgtttccccctgagagtgccaccctttgcactctcccctctacagccaatggaagcgaacttcacatcggcagtgtccgctatgaagacaccggagcatatacctgcattgccaagaatgaagtgggtgtggatgaagatatctcctcactcttcattgaggactctgctaggaagacatgtgagtgccccataggctctgaggtcctcattgagctgtatgttagggggacaaggggaatgcactaactctccagggccacagtcgccaaccgggagcctctaaaggctgggataaatctatttcctctgtacacaaagctaggtacagatggtgaccttttcaagcaacctacaaagctctgggaacatagacaatagaagtctctgatcaggacacagaggccaaataacccagctctgctcttgcctcctatgtgatgtacgactagaaactcagtcacaaaagcctttgtgccaccacgtgctccaggtattctagaagctcacaggtgcagatagcaatcccctctatacttcctttgatctgaatttccagaaatgaaccttttacaagtcttaaataactaagttttttttttttaatgtgtacctgtgtgtgctggttcacacacaggccagaagatgggatcagatctcttgaagctggagctgcaggtggttctgagctgcctgttgtgggatgctgggaactgaactctgagcctctggagtaacagcatatgctcttaactggtaggacatgtctccagccccttcaataactttttcatcacagcatattataattattcttttgtattgacagtagatgtgtatatgtgaaaaaaagcatgaatggagtttagtactctccgtggtatagggaactaccagatgaaactgggagtagagtggcctctcctctgggaattatcacccacctcgtgggctaagcatcttctcccttataaccactgcctccccaggtggccctgcaggtagcagtcacagcataggtggtggtcagtccctccccgtctgtcagactccaagatttgatcattgaatgagagaatgttcttccttggagagtcttaactaaaaattagctttcctggaagacaggaaaccggggagagaggcttcttgttcatcattgcccacagaatcggggaggctgctggaatcctaggactccatttcaaaggttcatttagaaagaaaaagcattctgaaatctgaagtatccacatgggtcctgcactgtggactggtgttgttgctgggccaatgagtgatccagattcgtcaagcaacaagtggattttagaatgtcccttagtggaatgaatcacagcagtgaaggtttgacagcgtccttttctctttctctcctgggtttcatgctgctgctctcctgattctcggctgccgcagtggcaaacatcttgtggcgggaagaaggtactgagtatggctgtcctgggtcatgtctgttacatgtgttctcacttccccgagcttccctgagccaccagctttgcagagcctatgtaccaaggggaaaggggactcacagtcaaactcatgtggcacacctatgcacagagccagcttagtctcctgagctttgggcactgagcctgacccagtcagtacatgtgagagacagagacccacagcagggttgttggctgtaaccattagtgcattctctgctccccagcttggttgcctcgactgcagagcttgtcttctgtgtgttttaagcagtgatatgctgttaggcatgctgttagggtactgcagagggactcatgtttatatagcagagactcctaagggaacacgagtctactggggctgctgtgtactgtagggaccaaaggcacactgaagtcaccttagactatagggctggtgggtgctgctttcagagtaaatgatgaaacactgaacaaaccccatctcacctcagcagttaaatgctttgcccttctctgctgatattcaagtcctagagaggccagaacacagaagccaagaggaagggaccacgggccccaggacactctcaaatcttagtaggagagaggtgagaccagacaacagcagcagaggaaactgggagccttttggagcctggtagtagaagctagatttcaacagagccttctagagggcagatcggaaggctgcgtctcctatgaggttggctgtgttgaatgagtattgactctcactttcccatactgactgagcatcattgctgcactaaactggaaacgtagctgcatctacaaaccctgtgtgggatccattaagatgtcaatcttgtgttggcttttctcgtgattggctttcaaagaagcccagggaggctttgcccagagtggctgtttcagcccaaggtttgtaaggtggatcattcatgacagagatgttttggcatggtgcctaagacactgagattgctgggtgtgctgcactgaggcatatgtatatagtagccccatatgattctccaagggataactaggattggccattgagtgcaatgctatgtgctccctccagcccaggcatctttgacggactgggttgcagcagcaggaacccgtttgcaaagctggtgataggttatgttggttccaaaccttggaaactgactgtctaccctctccaccaggaaagtacattacacctctgctatgctgctgtgccttgtgtggccctaccacacaaaaagctcatgactatgctgtgttcgtccctcccaggcctcagcgtgggaaacatgttctatgtcttcgctgaggatggcatcgttgtcatccaccctgtggactgtgaggtccagagacgcttgaaacctacagagaagatcttcatgagttatgtgagtttctgtggccgaggcagcttctctatcatgcatggtccaaatccacaggtcatgctccacatgtgtgcgtgcgtgtgtgtgtgtgtgtgtgtgtgtgtgtgtgtgtgtgtgtgtgtgtgcaagtctgggttccttcagctctgttcacatgacggtgtggttctaggctaaggaaggagcgtgaggcagagagttctagttctccatacaccatccagcagctgtgagggccagggtgttgcctgtgccctggactattcaaccctacctgcccttgagggttggaggtgaggtagtgtggagtcaatgacacagacttcaggagcaggtgagaaacactgaagcaagctcatctgaacacgactgcaagctcctttaatgccctctacccacaccccatcggtcccaagaaaatatctcttctaaacagcagttcccgattggctggcattgtctgtgccagcaatccttggtctctcaggcagtcctcaattaggttctcctgcaggagatgtctttgtagctgtacagaccctggcatttacatagtggtggcccctccatttctgctacaccaggggacactgggttcctggcttccagaacttcttagtcaaataatagagactgcaaggtgaacaggcagcccctagataggtgttcttgtgacccttaggcatggacacacatgaaggaatgcccagagttacagaggtactgctacaaatgacacataaagccaagtatcaagtgacagttgacaggagggggcagcagaggagataaccactggggaaggctcagggcgccctccctgctccattcccctgggttcctgctctgttctctgacatcccctcaggctgctgtccccgaacagttgcaccctgaccctgttaggcatggggtcatggtcctgcttgccagaacttagcatcttgtgatgccaagtagcaaaggcaatagagagaaaagagtctagtcatgggaggcagagcacatggcccatcctggatgatcgagtttgaggcacctctgaaagaaccaaacagacctgaaaggatgtttctgagctgaagacagagatctgggcaccatctggttgtgagtgttgtcaaaagctgaggaatggacagtggcatggctactgactgcagtggacagacatccaacagaggcctgagccgttaaccactcaggggcaggctgactaagagaaaccagaggacagggttaggacagggtaatgagaaaatccaagaaaatatgcatcacagaagacacagaaaacaatgttcctatctttaaaacataaaataaaaaggaccataatgaggggggaggaaagcagtgagctcctagttttgtatagaatgagggagattggagaaaaagaactaaaagttgattttagatatacaagtttaaggtgcaagagacagcatctaagagtggcgtgcacacaaggggcttaactaaagattgacacttggtagcatgctgtccttgcaagcatgaaggcttgagttagagatccttgagcccacattagaagggggcatggctggagagatggctcagtgattaagagcacgtgttgctcttacaggaaactcaggttcagttcccagcacccacatggtggttcacaaccattataaactctagttccagaggcatcaggcacacatgtagtatacatacaaacatgcgagcaaatcttttttttttttaagcatatgtttgtaattccaacctagggggacagaggcaggcaaactgtgatgttcattggccagctaccctagcctacatggtgaactctaagccactgaaaacccctgtcccaaaaatagtaatagacaaataataaggctgacagcattgggggaatgatatggcctccacaggcatgtgtgaatttgtacacatatgaacacctaggaatttgggagtagcgagtgtgcagatggtacctaaagccataggtttcagtgaggtcaacaaggaactagactttacagaagaaatccaagaatgagtccagggctatgccacacagaaagatctacagactgagaacacggtgacagagtgttgaccttgatgaggaagacaaaaaggtcaagtgagaaatttgtggtgtggcagggtctgcatgctgtcgtatgtatgaatcccaaggagtttgagacaagaaaaaaggggatccaagagggtcaatggctagagagcccagggatgtttgagtagggttgaagaacagatacatggctggctgtctccttacaggaagaaatctgtcctcgtgtggaaggagatgctacccagccatgccagtgggcctctgcagtcaacgtcagaaaccggtacatctacgtggcccagccagcactgaacagggtccttgtggtcgacgttcaagcccagaaggtcctacaggtaatagctcttggaagaagtgagaaagacttgaaatcctagggcaacgcctgctttgtgcatgctccccaactcctataagaagagcttagccagctgtggtggtgcacgcttttaatcccagcacttgggaggcagaggcaggtggatttctgagttcgaggtcagcctggtcttcaaagtgagttccaggacaaccagggctatacagagaaaccctgtctcgaaaaaaaaaaaaaaaaaaaagaagagcttagccaaaggagacttctgtgcagctgtctatcagatatatattaccgtgtgcccagcacagtatacatgttcaaaaaccagccatgaatgaatgcactggaggccacagaatggactctagtcagggaggcagaacacaatgcagagtttccgggcgctgtagggagcgagagctgtggaaagccagggttaatgtgcccaaggagctctaagactgcttgaaattgactctccctctggaactgagcagaagctgagattggaatgtctcctaagacaccaagggtggaagcagcatctagtgatgaggggaagaggtggaggcagtgagcttagggataaacaggagctggcccccagagagcctttgaggccagtgagactgtagaataaaatcaaggtgaaagagaaagtcaccaacagatttctgagcatcaattaacacagctgctgccttacaaatcgcaaggaagatagagcagggagacggcagagcttgtctcaggcacaaggtggtggcagcttcggaggactgtgatgagaaattagtggatttgcttatttttagtcacatgtatgtgcacatgagcatcagatcccaggtaggtggacttacaggcagtcgtgagccacctgatacaggtactaggaaccctagcttcagtcttcaggaaaagtagcaggcgctcttaaccactgagccatctctctagccctcctaaatctctttctggcaggttgaatgtaaggtttgagaagaaaagaaaggaagcacatgattcacttcctggttagcttgagcgtagaatggttctatggtctataatcaatgacaggttaaattaaatcccagcatccacatggtggctcacaaccatccgtaatgagatctgatgatctcttctggtgcgtctgaagacagctacagtgtacttatatacaataatgaatagatctttttaaaaaattatggccccaaagacattctatgccagaaaactgaatgttaccttatgtagcaaaagggacaatgtaggtatggctaaggatttttcaagttagaagatcctagaagatccagatggaccctggctgtagtcacaagtattcttgtaagggcgaggcagaggataatttgaccacaaatgaaatcaaggatgcaaggattaaagatgcttcatttcaaggctgagcatagagcatagtacagatagaaaggagattcaatttgaaatgctgtcaggtatctaggtagacacatcaagtaaacaggtctgaagtcaaaggaaagacaaggctgcagctgtctgcttgagtgtcatcaccctcaggcctgattaaatctagaaaactggctgagataccccagggtatacagataaacaagagggaaagaatggaggcctgaggctgtcccatatctaaagatcaagaggcaaagagatggacagccaagaaagacatctgaggaggatcgggctgagaggtaggaagaaatcctgggcaggtggtattccaataggcagagatagtctcaagaggtactctcagtgttaggccatcttgagaactggcccctggatttcatcttaccgcatcgtagaccactttagttacaactgctaggatgacaacaagcatggccaccctggggaaggggactcaagtcagaatgacaggggagagagagtatgtggtggggatataggcaaccgtatagatgagtttcaatgcaaaactacgagtatagaaatgaagaagggggtaccaaaggaatgttttcaaagacatttatgtccccagattatgtatgcaaatgctaatggtaacaactgttcccacactcctcccgtgggtcatcaaagtcagcgggctccaatgtacatgggtggggacaccagcagaagccaaaagaatatccccccactgggtgcaactaagccacacagggacattagttagattcctttttttgatatctttccactgaaacaaaaagaagattctcacctggtcaaaggtaagcatgagatcagattgaccaggcgcatatacacagaaagccgcactatacaattgcccactgaagggctgggactagaaacttaacctgcagccaatcagcagagctttcctgcccctgagtatagagaacaattaggaccaccagagttgtgggtttcccgggtagatgcaacagggtttcggtttgcctttttgtaactgattcccatgatcagagaacgcactgaataatttccatctcttgaagtatatactaaagcttattttaaaaccgaactcatgatcaactttgataaatgtttcatgtttactttacgagaacacgtactctggtatgagatgcactatttaatatgtgtcggttatgtcaacttgattcatcgtgctgttcagatctcctttcttaggtgatttgtattgtatgtttagtctatcaactgctggggtgagtttttaaaatccactctgctgtggagttatctacctctcaaagttctatcatttttaccttaggattatagtcccttcctagaagaaagattcctttttcttatgtcccttttatctctggtaatgctatgaaccagttttttaataatgctagtatagctaaatcctattttaattagcattctcagaccacaattgtccatccttttacttttcaaccttcctattccttatatttaagatgttcttttataacatttaaatttatctagtttaattagccttttaaaatatttggtccatttatatttaatataattgatatagttaagtgtttctacaactttaccttttatttagcctgtttatgttgcttttctctcatttttgtttcctgttagcttcaagaaatacttgtgttctatttttctccattatttattgaagatgtacttgtgttattatcatcttaataactacaacacacatctttatactggtactatcacatgtaaattgttaacttttatcttggcttcctttcttgctacaattctaaaaaaaaataagtaaataaccctgacaaaagtacttaggggagaaagggtatgattctagatccattgttgcaaggaaatcaagtacaaaacagccagtcacattacattgatagttaagagcagagagcaatgaattagcaaatgcacctagtgcttagcttactttctccactcttttaaacagtccagaatcccctgcctagagaatgatgccaccaacaatgggcaggacttcccgcctcagttaatgcagtcaagataatccaacatagacaagcccagctgcccatctccctaacttatgtcaaatatgaagttcaacactagccatcacactgcatttcttcaataatcactaactcctttaaccttcttcctgccttttatattattatagtaatatacaaaattaattagtatttatatccaggcaataactgatatttacccatatatttatctttctagtcctctttaaaactgaggtatatggtagttgttttgacaacatctcactccataagccaggctagccttgaactcacagtcctcctgcctcagcctccgaagtgctggaatgaggtcattttttttattagctcttttagtgttgctggaaacaggtcttggttttgttggaagtgaaaatattcactctttatttctgaataactctagatgacagttgtttccttcagcattgtaagattctatctccttgctttgttgctaggccaactgtatcttccctgtctcctcctctgcattcctctttgtttagcattttaactgcaatgtaaggtttccagaggctcttgagtttgcatactgaacatttattagataggaaaattctcaacaattatgtctttaaatactctgcttcctagtgctcaactctcttccttaagaccacctatccctaccctcacaccaatccccaaccccatctttaaaatgttttgcctttccattgtatcacatgtctcctcctgtttcaattctgtatattctgcaatgtgtccttcagttttactaatcctacatctaatataggcttgcctgatcatcatcatcatcatcagataattcattttaccttcaaattctctatttaattcccaatttcacataaattcttaattgtcttcttgtggcccttcctgttacgattttgaatagtaagaaaagatatctgcctcttgaaatgcctagtgtttattttaatccaaacattctacatattttttaagttgtaaaatctgtaaaatagctgtcacccatcagaaagacttgccctttcctctgctaggcagaaggagtagcaagttgatcactttaaaatctctcgaaggccaagtctgctctatccaccccctaatcctgaggctttcgctcaggctcttcctcctgacagacttcagtgcctcagcacagtgagactatggaagaatcccattctgaatttaatcgactttttggctcagcttttcagcgccctcctttacagcactgagtaggagcatgaaatctcacaagaaggcattaagcagtaagggaagacaatggctactgtctaaatgccaaggaaattttgcagtgaaaagggcagataaacgggacatgttcgagaggggggacagaagagaaggagctttagaaagattaagaattgaggtcctcagatggtagcttcactgtgggatagaaaactccaggtggagcatggcagtgccaaggtgccaaagcctttggtaatttggtattagttccttgtcttattgctatgaccaaatacctgaccagaagcaactgaagagagaaaggtatattttgactagaggtttgagggtcccagtccaccacagcccaaagagtctccagtgtgaaggggttggtcatactgaatccaccgtcagaatggagagagatgactattagcactcagaatgctttctctctggtttcccttttcagtcagtctatggaaggtaactcccgcataagccaacactgacagccaccatagtgaaagcagtaaccaggaaggcagacatgccagcctaccagaggagacatcattcttgaaaattaattagagcctctccttgggacttcagtgggtgggagctatcagttagaaccagaaagtaaagggagactttaatgagagtggggatggaagacggaaaacattccagcagggtgtgagggagcaaaattacaaactcagttctgcactttaaggtgaggttattagaattcggtaccagggaaaggctatagatgaggccagtggagaagctctgggatgtgccaactcttgtcaggaagaagtgaagaaggacgtggagaaacaaggaggtcaaatgaagtgtttctaaaagagaatggtgaccatataaagtcctataatgctaagaggagggtcataaagtgaccactgaacttttgagggggtctaggactcctcaccacagtcatggaagatgaaagggtcagggtggtggcttcatagagagttgtttagcaaagtttggcccaatgtggacagagatggtcattgttttaaaatttttctacctgactagaaagaaacttcagaaattatgaggcaaaaattatggtgatcaatggaatgcaggaaagacattgaacccatggagaaagtgggtctttgagcatacgtgatggatagttttatgtcctctgagaggcaggaacctcaactgagaaaatatcccataaaatgtcctgtaacaagcatggagggcattttcttaattggtgaccaatagggaaggatccaacccattattggtgggtccacccctgggctgagtggtcctgggttctataagaagacaggctgagcaagccaaagggagcaagccagtaagcagcacccctccatggcctctgcatcagctcctgcctcctggttccaactctgcttgagtacctatcctgacttcctccaatgatgaacagtgatgtgggagcataaactaaataaaccctttccttcccaagatgctttggccagggtgtctcatcacagcactaagacagggctcatccatatggatttgaaggcatcaaacttggtggccaaatggacagaaagatggcaaagaaggtagagaacctgtgtaagcaacttcactgagtgtgggggttataaggaaatctggggtttcataggccaggagcacgatcatcaaggaacagttttgtaacataaaactaccctgtggggctagagagatggctgagcagtaagagtgcttgctattcctgcatcaaagccgagcttggttcccaccacccacattaggtggctcaaccacctgagggtccaactgcaggggaatctagaaaaaaacccttttttctgtcctcctcagtacctgcactcacatacaacatatatagaatttttaatttaaacaataatctacaccataaaaaggaggatacagcatttttgtagtaggaccttggataagttatagacttggtaggtagcagactctcagatgcttcaattcaaaaagtgagcatgcgcctgctaatactgtagcctgagtgtgtgcctgctgatgctgtagcctgagtgtgtgcttgctgatgctgtagcctgagtgtgtgcctgctgatgctgtagcctgagtgtgtgcttgctgatgctgtagcctgagtgtgtgcctgctgatgctgtagcctgagtgtgctcctgctgatgctgtagcctgagtgtgctcctgctgatgctatagcctgagtgtgtgcctgctgatgctatagcctgaatgtgcgcctgctgatgctgtagcctgagtgtgtgcttgctgatgctatagcctgaatgtgcgcctgctgatgctgtagcctgagtgtgtgcctgctgatgctatagcctgaatgtgcgcctgctgatgctatagcctgaatgtgcgcctgctgatgctgtagcctgagtgtgtgcctgctgatgctgtagcctgagtgtgtgcttgctgatgctgtagcctgagtgtgtgcctgctgatgctgtagcctgagtgtgtgcttgctgatgctgtagcctgagtgtgtgcctgctgatgctgtagcctgagtgtgctcctgctgatgctgtagcctgagtgtgtgcctgctgatgctgtagcctgaatgtgctcctgctgatgttgtagcctgagtgtgtacctgctgatattctagcctgagtgtgcacctactgatgttgtagcttgagtgtgtgcctgctgatgctgtagcctgagtgtgtgcctgctggtgctgtagtccaagcccaatgacttcaactgttgggtatgcaacaatgagtagaacaaaggtaagaggtgggtagcaacaggtggtctcaaaatctacctcagggtagaagtaccaactttaccagaagccaagaagatgctacgggtccaagaggcacccaagacttctaagaagaataaaaagagacccctggagctggttcttgagtagaatttgtaaaacctctatgctatgtttattctttgctcaagttagacctagaatactttaggtaaaatataaacaagaaagtaagtgcttcagagagacaactcattgtgtccttttgccctctaaggacaaaagccatgagaaattttggtaatcaggattgttggctagggctcaaggccaacttcctaactccccttgtaagatgatcacatacacaaaagtccagaccatcttgatgtgatgtaacctcagcaatgatcaacttgtcactgtttttcttcaagtccataggtgtggaccctctgccagtcaagctgtcctatgacaagtcacatgaccaagtgtgggtcctgagctggggagacatgcacaagtcccaaccaagcctacaggtaggttgagttaaagctgatactcagtacagggttctgttgctatgacgtaattgtctcgtgtttctctgggtggccatctgtccaaactgtttcttgagacaaaaacaggagacagtattagtaaaaatttatctgtaatctaagaataaactctcagttgaaacacttgtctagagcagattggcccacaggcatgtcgttggatatgtagtcttgattgttaattgaagtaggaggatccagcccactatgagaggcaccatcccctatacaaacagtgctgggctgtgtaagaaagctagctaagcttgagcctatacccaagccagcaagtagtgacctccaaagttcatgcttgggttttggccctgacttcttcaaggatggactgtgacttggaaatgtgagctgaataaatcctttcctcccctaagttgctttaagtcagtgttttatcacagcaacagaagaaaactaaaattagcttccaagcaatacacccattaggcaattcacagtgtatcttcaatcaggaatacaactgaaaacaatgtaaaatggtcaaattctaatttcctgacaacttagtccctgcctagccccaccataccagattctccagagttgataactcttggggtcaaacaggatgaacctctggagtccagatggtgaaagggaagataagattttcttctttttgtaatgaacaaatcatctaaagaataggagccgggtgtggtggcgcacgtctttaatcccagcacttgggaggtagaggcaggcagatttctgagttccaggacagccagggctatacagagaaaccctgtcttgaaaaaaaaaatagtgttaaaagtcatgaatgtgggctctttccatttgttttctgttgctataacaaactacctgaagctgtgtgatttaaaaaggaaaagatctgttttctctcatggttgtatctaagatcaagtggctctatctggtcagcttctagtgggagaccatagacagaggtgctgcatcccctcatggtggacacatagaaagggaaagcagatgtatgtggaaggggcacatgtgccagcaagtgagaagaaaagggcatgacgctccccttatagcagtcaattcttgtgagaactcacccatcctataattaatccctttaggagaatacaaattcacgaatggagctcaagaaggtccaaccagctctcaacactctaacgctgcagttatatgagtcatgtgccaacatgagtttggtagaaacacactctattaaaccatcattctaaccgcagcccacatgcttgaaagcacagagaaagcacttaggcttagtgtcacagagtgcagtgcagggtcacagacagttaagtgatttgcccatggccatggccccagtctgcatggctctaacgcacctcctgagaagaggctaggctctgctgatctgtgggaattctccctacaccagctagagaagcttaacactacctgtcattggctgtgcctagtcttgtctctctccccagggatccactaagccctatggggaaaaaaggtcataaggttgtctccttggttctcctgaaaagcaatgcacagaaccatgtgaatacaagggaggacttaactcactccatgcactgaatgatgtgggcctctagggttgaatggtctcttagaaccaacaaaagtaaatggaggcaacttggccttctccacccagccattgctgagcccaagggaaacaacaggcccaggtcgggtaaacctgacaatcaaacaaaagagcttattaaaggacctctgagccaaaataaagaccactaagaacagaaagtgagcttagagatctggggcggggtgggggtgggggactgcattattcccttttctctgtagccaaacaccctttgaatctcagccttgaggttagaccatcacagcccagaagaccgcacagcaggagtactcctaggtgaggtaaaggaaaggggcagttacctgacatctcctgggaataggatgctgccagggtaccagaaacaaggtcaggcttcgtgcttcaaggccctcccttcctccagcaacccacttcctccaacggtgcatcacctgtggattgggacattgcacatccaaagcacaacagagccagacttcctgaaaatgcttctaagagaggggctgccagaaaattggtcctgtttcaactacaaaacatataccaccgagtatgatcttctgtggtgctgggaatggatgtcagggctttatgcatgccaggtaaacacactactgacagtcacatccctagcatatccttatctttaaaaaaaaagggggggggcagaagctggagagatggctccacagttaagagcataggctgttcttccagagggcctgggtttaattcccagcatctacatggtgcacacatggagcacatgagcaagactggctttccagtttaaaaaccacagtgatttagaaaaagaaaaatgcatttctaagaagcaacctgaaagaaaaagaaaatcttcctaaaggaataacctctgaagagctggagctgtggaacgggatctctgaacattctgagaaagttcacagtcggattagaagcaaacattagatgcgctaggcgccgtactactcacctgtaatcccagcactcaggagctgaggcagagggatacccattccaggacaaccagggtaacataggctatcaaaaaaaaagaatgaaacaaatgtggaagataattgctgagttaaaagctataatcatgtagattcaaacctagggctggagaaaaggcttagaaggtaagcgtgcttgccacacaagcctcaatgcctgggattcatccccagcagctgggtaaacatggaaggagagaactgactccacaaagttgtcctctggcccccacacatggggaaagaagagtggagaaaatgtttgggtgtgaatatcccatttctccaaatatttcctttgtatgtgcattgctgttttatctatgggtatgtctgtgtgaggttgttggaccccctagaactggagttacagacagtgtgagccatgtggcatgcataaagccctggattccatccccagcaccacagaaagttatacacagtggtgcatgactgtggtctcagaactcgggcagtacaggcaagaagatcagaagtccaaggtcatctttggccccactatgagtttgaggatagcctggactacatacattcattcattcatacatacatacatacagtgattctataggatttaaaaagaaaaccattagaaataatttgtttttaagaaatataaagccaagtctagtgacactggcctgtaatcatagctactctggaagtaaaggagagagggtcacgagctcaaggcctgcatgaacagtaaagtgagttcaaagccagcctgggcaacttagtcctcacctcaagaaagaacaaggagtggggcaaagagatagctcagtctgtaaagtgcttgtgttaccagcagggggtcctgaccccctaaaaccatagaggggaaagaaatgaatgtggggccagcaagatgactaagtgagaaaagatatttgtcacacaagcccaaccactaagccccatccctagaactcacagtggaaggatagaaactgaccccccaaaagttgacctctgaccctcacattcactcctgcacacacacacacagctttttaaagctgtgtatggggtctcttggggagactgaaacaagaggattcctgaactctgtagccagccaacccagtctacatagcaaattccaggtccatttaagatagtctcaaaaataaataaaggcgactgtagagctaaaggaagagtctgtggttaagagcactggctgctcttgcagaagacccagatccagtacccaacacccacatggcggctcacaacgatccttaagtccagttccagagatctgacatcctcttttgacctctgcagacaccaggcatgcacacggtgcacatttatacaagcaggcaaacactcacagcacataaaataaatatttaaaatatatttcaatttttaaaattttaaataagggtgggtgggacaacacccaaggttgtcctctggcccgcataagcacatacatgcatttttgagttaaagagactagaatctaaccctgtgctggaatgctttcctacatgtgagtcctaaattcagtatgcattaccaaaaagaggggagaaaggacatgaaagaaataaaaggagagaccttgaggcttgaaacagtggtaacagttgatcaaagggatgctcgtgagagggaatgtgagtgcccggtgaggtgccttccagttgaaaagctatggacggcaggagagactttcatgatgatgaatagctgtgtgcccaacaatgtaactaaatgcataaagcagtgattaaatataatatagcttgatcaaagatgggcctagattgtatatatcagggaaagaaaataacacatgagaaaatccatcaacacagacaaggagctggacttgatatataggaaacatttcagctagtagaattcttttacatgcatataaatacaaaaaaaattataccattaatctaaggaaaatgtcaaaggttttgtaaaattagatgttctaggctataatatctgataatcagaaggtaagctgagtcctggagagagggcttagcatttacgagtccttgccacgattatagaggacctgagtttggttcccagtatcttcatcagggggactcacaaccacccacaatctgaactctgagagacttggtgacctcttctagcaccacacacacacacacacacacacacacacacacacacacacacacaaacattttttaaaagtgatcctagaaacagttgaaaagctatacatggccacatacacacttatgaccgcaactctggatgctgagacagaaagattggaagttcaaggatagcctggaatatatatagtgagacccctgtacctccaaaacacaggcaatgaaagagactgcaagtgtggggcaaagagcgtgctgttaatgtttgtaaagcattcaaagcatcctgccattccttctgaatactggttattcaggattggttacatttttgccctggctatatggagatgaacccatgtgtgaagctcactccctcactctcctcagcaaccagtgttgaccgtaggcatcaccaagtctgccatggcctgaccccaggcccagcattctgtcacctctgtctagccgctacttcttggcgggtgggcattgtccacccaactaagagatgctcgacattcttgtccccgtcccccccatccatccaggtggcacttggtactacagtgccatcgctgtatctttcctgagctgagcccagagaaccagaagtcttcagatttatctttgtagcatctgtgggctcagctgtgtgctaggacacaagactggggcaagaaaaacttcagggctccaaaaaaataaagtcgatctacatggggtcactggctcatggtcctgtgtctgatgaagcaacctctgaatacagggtgccagggtgacgaagcacatgtgacactgaccggcgacagcctgtaattttctatctctattataagctgaaatgacaggcctggcatcaagcagcgactacacgctgccttggaattctcagcctcgtttcccagagtctctctaagaccccatttctaatccttgtattttcttaatgtccagttctatgagcttgttctcccgtgggcttgtcaggaaagcatcatcctgccatttgttaaatagaaaaattacaggaaaatacactccgtgcaacctcaaaaccactcagagagtagaaatcacagcatgtatccttctgctcttgcctgttgacattcccccacccccaaggctagcatggctagctagtcctgcctgcacagccaggccagctgctgtttgttttgtcatgaaagtgaaagccagaaggcagttcctttcctaaaaggcaaaaaagctcggtgctgcaagctgtgttctcagcaggccccatcagagactgcccttgtcctgtaggctgccatgggactgcagaaacctgggtcctttctgctactgccatggccgcaacatgagtgtaaaaaatgtttcttcttcctagctgagagttgagggtctgcttcctgtccctagtgcccttgaactaaaattgcctgtgagccggctgagccacagggcaccgtagatctgcctctttctgggcagtggcctagaacctacaagaccagtgagcatgtacagaagacagggcctagattagcccttagccaagtggcttcacacaaggcccccgattttgactcatcttgtctaacctctcttactgtatagtctgtctgagtcaacataacagggacacctaccagggcatgggcccgtttgctttctgccaagtctgcatggcagaaagcattacctgtagggaaacagaggtatccaggctccagtgtgtgcaaagaatgaggccaacatcttctcgttagggagcaagtccctttggcatagctagagtcacactataagatgccattatggtgttagtgacagccctgtaggatgcctgctttctctcaccaatcctggaagtctctacattttgagagcaacataggacagaaatccccagaaactcatgcaaaggtacctagcattaacgaaaataaattccagattaggaagatggctcagagtgcttgtcatacaagcatgaggacctgagttcaatccccagagcccacatttaaaaaaataaataaagccaggcatggtgatgcacactcgtaatcgcagtccgagaaggcagagactggcaggtcctgcgggcttatggccagccagcttagcctactcgatgagttacaggtcaccgagagaccttggctcaaacccacaaagtagatgggaacatgagaaatgatacccaaggttgacctctgccctccagtagcatatgcattcgccccacacaaacacacaagaacactaaataaatatgttaaattccgagcgcatcaggcctttgtccattcactctccctcttttgctgagattgagcaatagcatggaggtctactgttgggaaagagctgtctctgaacatgttcccatactaggaaagcccagcgccattccctaggtcctcaccccgccctcctggaggctgacagaaagcccactgccgggtctgatggaggagggggtggacggtctgggctgtctctccagtcccatcactccttcatccagaaaagacagattcctgatcttcatgttcccaagtagccttcacccggctcctgtcccctccctgagactagggcttacccaccatctatctgccccggcagcctgttggtggggtctatagctgaacacgtgcatgtccagatctccagccccttcctgaaaaacacacacacacatgcacgcacacacacacaagaacccctctctatgttacaggtgatcacagaagccagcactggccaaggccagcacctcatccgaacaccgtttgcaggagtggacaatttctttataccgccaacaaatctcatcatcaaccatatcaggtaactggtccaccacgcctctgcaggccatgctcagccccattctgcctgggcagtcatgcccaggtcagcaccaggtccccccttgccctcctagtacttcctgctctgcctttgaatcgaaaaccactcagcagacccagagtctttagagactggccactccccttccttcctcatttcatagagcacccacaggctgtgcaaacttccccttttgtgtcactgagacccccagagatctcactatgtatgcctctgtgaactgacatcaggtactgtctccatgaagaaatggttcgttttgcgtgctggtaccagggacccagagagaacaataggctcctaagaacctcttctctgcagagcctcagagctggaatgagcccccacccggatgctggcatggtgcagactcaggctctggatgcttctgagtggctcttaagttcgagttccttttgagaacaccgttttctccctctgcttctttaaggatgctttaaagtcaatgcctagagcattttgcctgctctggagatgcctgtttttttttttttcaggaggaaatgatagacgcagagatgtctcctattcttctggtgcattcgacactgaaggcctctatgagcaaggctcttgggtgcagggtctctggggaagtcccacctggagtcaaacctttccatatttgcaggttgtctgcaacagaacaccaaaaagctagatgtgaccaagtctcatctgtttgagctccctctcagatccagtcttcccagctgccctgggaacagacagggatctcatggaagtccctgacactcagagagacaagcctgtcctaggctcagtagccaaagggcatcagagcaccaccaggccacgtgacttctgaggccaaagttgcccattgcccacattctagatggcagaggggagaccacgctgtgcattcatcccctcccactctgcctcctccctccctcccgacgtcaaggctgcaaacagaaattctatcctgtttgactgcatctgtgtcttcaaattccgacttaccagtcagcccaagaacaggctgatttataagattgtgtccttatgacagtagggcacgagaggtctatctcagtctttttctccatacctaccctgcaagcctagatccacaccccagctaacacgagctaggaaagccatccaaaggcacccctgccccagagacatgtattaagggcctttcccactcccaacttctgaagatgaatggcttttgcaaacatgcaaatccacgaacgtttaacctcaactgttatgtggctgacgcgtgtagctaagtgacttctggacgcattccctgccaaatgatagatcttattaatagatggctacatgactgaagggttgggaagccatcatttaaaacaaatgacagatgtctcacccctcgcagtggcctcctgctctctcaccaccctccctatcattctcctcccaggtttggcttcatcttcaacaagactgaccctgctgtccacaaagttgacctggagactctgatggcactgaagacaatcagcctacgtcactacggctgcatgcctcaggccatggcacacacccaccttggtggctacttcttcgtgcagtgtcaacaggacacacctacctccaccggcccacagctgctcattgacagtgtcacagactcggtgctaggccccaacagtgatatcacaggcacgccccacgtgtcccctgacggacgcttcatcgtcagtgtctccaacaagggcccctggctgcacgtgcaggaggtcacagtgcggggggaaatccagacgctatacgacctaaaaataaacccaggcatctccgacttggcattccagcattccttcacagaaggtagtcagtacaacgcctatgccactctcgacaaggagccagacctgctcttcctggagctgtccactgggaagatgggcaggctgaagaacttaaaggagccacccagagggccagccccaacctggggtggaccccgcagagtcctgagagacagcgggctctttggacagtacctcctcacaccagctcaagagtcactgttcctggtcaatgggagacaaaacgccctgaggtgtgaggtttcaggcataaagggtgcggccacagtggtgtgggtcggggaggtatgaaagttggtaaagaaccaccctcatcctgactccgcagccccaaccaggcgcgctgtacattttcacagacaaaaacaaaaacaaaaatacaaaaaatacaaaaaaacaaaaaacaaacaaaaaaacaagccaaaccctgtacttcgctttgtggttcaacactgatctctgtgcaagttccctagtataagatatgtgctgcaaccaagattgggtggttttcatccagaagtatgatttaataccgtgagctatgatgagaacacacactgcttgtgtgcaggaaagtcatctccgtgcccggttgcacaccgtgttgcctgggggacaccacagaaccgagggatcctgctgcccaggctgacacttctgtcagttgccttcacgtagtcattatcataacctgcccagccccagccagtctgtgccctggaggattggcctgagcagcaggctgtccctctcagcgagctaacataccctgcctgccaggaacctcacttgagccattaactgatgctgtttgcttgctttcccatctgaatgctatctccatgagggagagcctctgagacttactacaccttgggggatggggaaatcactctctttattttggaatttttttttattaaaactagttggtttttttttttttttttttaataatctcagatgctaggaggcagatagatgctctccaaggtcctgataaattattcccatccttaggcgaagtctctgaagagaaagggttccaatcttacatgagcagaaaacaaaatgatatccaagaaacagaggcactccacaccattgtgttgttgaccatgtacagcccataccaccatggtaaaaatctatgcgggaaccccaagagaccaagctgaggtttcaccatagaaaggtattaaggaagcctaacgtaccagcagaagtccagacccagggcagaccaggcttgcctggcaagggataggcagtctctgggctcagtgccaaaatctagaagccacgagtgccatccatccagagtcctaaggctgtgtttctgcacaagcagttggcactaatgcctcagccactgtcaccacactgcaagagagccctgttccctaagtgttctcattcccacactctaagctacacagtctccaacttgcagaacctacaaaggaccgtgtcagtccctcctcttcctgccttcagtatgctctcaagccatcaggaagaggcacaacccagccagctctacagggaccacctctgtccgagcccctcagcaaggagagcccctacccaggtctccccaaacactcctgtccactcccatgtcagtggtcaaaatatgcctgctttctagcttgaataatcattctgcaaaccctacagcattaagacagtgggtctacccccacccttcagctaccttagctacttcatctaccaacaatggccgtgactttgaaaacacagactgtacttcattcctgcttcctgtgtaagtactcaattgcctgtgccagtttactgccactagtccagcctgccccacatctcctgtctctcagtccactaaacaactgtcccttacagtccccagtagttgtctgtatatgtgctatcatgtttcagatttgggtaacgacaagacacatagaggttgaagatgctgacctcagaggcctaatggtcatcttcacacctggggtggatggtgacgtattttatctgcctcagtatcttgatatgatccccagagtcctatgttttcattaaaaccttccaatgtttgtaatttttttccttttgaaagaatagtgcctgcctctggcagaagaatccctgagcctaagaggcagagcatcaccacacacacacacacatacacacacacatatcccaccaaggccagagcatcatctctccccatcccaccaagaccagagtacctatcctctttggatgcaggattccagaatcaaaggccagtctgttccaccagactggatgaaagcaggggtgctacttggccactgtctgtctgtctgtctgtctgtctctctctgtctctctctctccctctctctctccctctctctctctctctctctctctttctctctccatatacctgtaaggcacccacacatttttctattcttctggtagaattgccggagaaagccaccatatgtctagtgacctgcatgcaggacttagttaaattgagaaatcacaagtctgagacctactctgatgtcagtagctcagcccagggcacagccataaaagtggagtggcttcctgtagaggaaggcagaggactacagagaaatcttcccctctcttcattgtgggcccagaagagactccggaatagagtttaaatcccaatagtggaaggtggtgacacaagtgagtctcctgccacaagcccagcccaacgggttgttctgaggaacacaaagatcaacagctaacagtttacccagggaggattggtttaaccaacaaaatcaccaggaaagctatttctataaaccccatctgtaattcttaacagtcaactaacatcataaacacccagccattcttttctttccagaaaacaaacacaaattctctgcatctgtagctcctggttttccttctgccccaaagtcctctttcttaacatcctacccagccacccatgagtgcatggaagagagacttcctgcttctgagtctgtgaccctcctgtctaaacagaccagagggtaggcaacccccaatatgctaagggaatctcttcagtccccacatcacacaaatatcctgctgccttcctggatcccgggaggaggctgggaaaggcctgaagtcatggctgggatcaaatactgatgcagagctgcaggttctttgatgtggagagagagagtatcaccagagaagttcagtctctctgctgcataccccaccacacactgagctatctccccctccacctgctcctctgttgaggaaagggctcccaactgaaggggctcaccccaggaaggcagctcccaccccaaacaaagccaagagcagcagcttgctgccatgaggcatgggaacttccgaatctttgttcagctaagcagccaggagttggctttgtacagccgcatcttcttgtttgtctgttgaccaataacctgtgaactaagggagatctcagaactgagatgtgaaacagattcgctctggatatatttttgtaccacgggctaaagtgtagttgcttcatttctttttcatgtgtttcatccgagtaccactgatgctgaaccatctcctaccctcccagaagcctcctggagaattgtcaccactgcccctcccctctgcacacccaccaatctacctcacatcttcctcccaggcacccagcacccccagaatgccaccccaggaggccaaaggtgacagaagactaccgtagcacggactcagaagtcctccaccaaccgcgccccgagtcccactccatgtgtgaccagaacccactgggaccgcaccttgttgtccagaatcacagcccagacccaagctctcatctctacaggcttagaagccgaagactagggaaaacaccttcagagtggccagaaagacggacctttgtccaacagtgacagagctggtgacatttcatttcaaccccgtctcatgctaagcagcccacgggctccgacctccatctgctcccgcttcactcactattcctggttccctccctgaatcccaaggcccctgctcctgagatctcctagaatggccctcatccttcaaggagcaacaaccctctactgcaccagcttcatgcatcctttgcccacaacgctccttgctttgaggattcaagtgagaagttactcacagaccagaagttactcacagaccacttgcaaccaggccacgacagagacaaactggatttcttcaagaacatcactaactgccttcattgggtttttactccacaaccacagagatgctcagtgggacacttaaaagatccaacaggagcagggcacacagggtgtgaccacaagatgccacatggctggtggaaggcgacatacttcctgcttactgctctagctggaggacctgtgtgtctcggctgagcctgtggacttggacatcagctccccagcagacgcctaaagattataagtgagcatcatcctagtcctccacagtctcctttggctctttgggtatctaattacactttgaggaagtatcatttaaccaaacacaatgggagaaattatgggatgtatagggagagaagaaatggacttcagaattcgtagtgaggctttttagcaggcaccagcgcatttagaatgtttttgcattttatatgaagtcacaattgtgcacctttctttccaagctcaactttacgaccagtgacagtccatgtcccatggcttaccccccccacagctcccaccaatcaaggagcatctgcctgctactgtctcggcatcatgttgcctccactcatgacgccttactgctttagggttccaatgaaaagtcactcatggcctagggaacatggccctaccctaaacaactctagagaacctggcctacacgcacaaagccttgtgtatgaactgaccctctacaccaagccttggtgtcatgttgctctccaaagttcaccttctaagaaagggaaaccagccttgaatggctgagagatgcagggctctctaaactctaaatccttatccactgttgagcacaccatctctagggatgggagagaaacaagcctataggaggtcagccccagcccactgtgccccacgatggtagcgccccgtactcacaccctccctgcctgcctcctctgccttccctccatagctccccatgttccccagtgatgctgccctgcttcctgaaggctgtgtaaaaataaatgacccaaagtgaaactgggcatgaagttttgctggagtggtcgcacattgtttcacgctattgtgctgccaaatgaccctcaagttgtggatccccatacaccatcaagagagtcatcctctccccccacctcagaaaaacaaaaaaaccacctttggatctcttacattgaggcaggttacattcttttgagcagttgtgtagactccaaaatatattttctgtaatcagtatttctcaaaaggccacctgtaattattaatacacatgtgaatttttccttatttataagatatatataaattatttttaatacatcaactttagtagaaatttgtaccaacccagtaactgtatgtggcatttgaaataagtttgtgtttctgttggtgtgtgacattgtattgaacacacgctgcatttaccgcaccacttggcaaaagaaaaaaagactcacagattatcataagggacggtcattgtcgatgctctttttctgaggattttacaataaaacttgaaaaaaattatgtctttagaactagtctgtctgcagctgtggatgtgggcatgcatgtgaccccaggcatgtgtgagccttaagcgtcttttccagcttctccatcctacgtggtgaccttaatacctcccctacagcaccaattcctgacgcgaggacgtgaaggactaggtttcagtgtgtgaatgtggacgatggggagacaagcgtttctttcaaagcagtgctcagccaagctgacctacacagtaagctgccacggcaacagaagctccatagtgctgctctctgctggacctcggactgccccgacctggcctcttgctaggcactgaagtggtgtgcatttccagtggtgtgactagccagggggagattggctattatcatctctctttcttttaagggctttttgttagtgtgtgtgtatgtatgtctgtgtctgtgtgtctgtgtgtgtccatgtgtatctgtttgtgactgtgtgtacctgtgtgtgtatgtgtgtatgtgtgtgtatgcatatgggtgctgattcccacagaggtcagacagaagaaggcaacagatctgcagctgttgttacgggtgggtgggagccattccaataccagagctgagaactgaactctggtcctctgcaagagcagcaaaagcttttaactgctgagccatttcttcaactcttcttttttttcaattaacatatattaattataaataatgggctttgctactatatatgttatgtaaatgatatattttaatcatacttacatccttctaccctttctggtcccctcctattcccactgatcctctttctcttcccaattagacctcatccttctttcatgtggtgtgtgtgagtgtcccagtgagtttcactaggattgcttacaggatcgtgggggtaaggggtgtttataggagcataggcaattcatcgggaactacactactgaagaaaatgtctcttcctccatcagcaactattaactacctatagatcctcaaagaggggtggagtgaagtgaccttctcctttctccacaaataatcgccatttcaattgaagcagaggctcagaaggacagaactggctccaattcaagtccatagaccaatggatgctgattcctgtgctcgacccacacacagcaaagcctgagcctcagctcccctagcctccgccttctgtatctgccttattaacattcacccactgttcctgcctttggtcctacccaagcctgcacttaccaccacacaggtgcagctcactccaagatctatccatatataacaggacagaaccttgtgtctcaccttgcatcccaaatgtccaccctgacccagccaatgaggccactctgacaaaaagtgtttgagcctcatgtgcccaggtcctctgccctcagtttgcttcctccctttgccagaacacttttgcaactgcatctattctctgttcagccattgttctccaaaacgtatctctgtagccaggcctagttgcagagaatgcctacagtctaaaggtgtgaaagctatgaagaactacaagagccccggctcatccgtggtgctcacagggatgctttcttggggataagttttgcatggggtgatctgaagttaaatgtaaatgcctaagtgcagaagagtgtgggtcacaacttgcctgctaataaaagcagcaaagcgtctttggatctatgaactgtagcatggctgttctttacatctaatatccatttatgagtgagtacaatatttgcctttctaagtctgagcttcctcactaaggaagatttattttctaattccatccatttgcctgcaaatctcaggatgctattttttaacagctgactaatactccaattgtgtaaatgtaccacattttctttatccactcttcagttgaaggacatctaggttgtttccagttcctagctattatgagtaaagctacaatgagcacagctgagcaagtgttcttgtggtagagtagaatgccctttgggtatatgcccaggagtggtatagctgagtcttgtggtaggttcattcccatattgatttccaaagtggctgtacaagcctgtatttccaccagcaatggagaagtgttctccttactctacatcctcatcagcataagctgtcactttcgtttttgatcttagccattctgacaggtataagatggaatctcagtcattttgatttacatttccctgatgactaaggacatggggctggaaagatggttcagtggttaagagcactgactgctcttctaaaggtcctgagttcaaatcccagcaaccacattgtggctcacaaccatctgtaacaagatctgactccctcttctggagtatatgaagacagctacagtgtacttacacataaataaataaatctttaaaaaaaaaaaaggtgctgaacattcatttaagtgcttttaggccatctaagattcctaagttgagaattccctgtctagatctggatattgttttttaaccagcctatttggtttcttgaattctttatctattttggaaatttcccctctgttggacatggggttggtgaagatctttttcccattctgtaggctgccattttgtcctatgatagtgtcttctgccttacagaaactagaggcttcatccagcaactgatggaaacagatgcagagacccacagtcaaacattagggggagcttggggaatcctgtggtagaggaggaggaaggattgtaggagccagagaggtcaaggacaccacaagaaaacccacagaatctgggctaatagggctcacagagactgaactgacaaccagcagcctgcatgggattgacctaggccctctgcacagatgttacagttttatagcttggtcttcttgtgggactcctaacagtgggagcaggggctgcctgtatttgggaccttctcctcccatcagggtgtctcatccaaccttaatacaaggagaagtacctagtcttaaagaaatttgatatgccatatttggttgatatccatgagaggcctgcccttttctgaaaagaaacagacgaggaatggatgtagggatgaggtgaggggaggggcttggagaagagaagggagaggaaactgcgctcagattataatacatgagagaaaagttttaatttttttaaagcagcaaaagcaatgagttcacatgagagagaacagccagaatgctgtccccatagacatgatggccctatgagatctctgcacgcagtaagccagaggttagaaaagctagagtgccatattgctatagaaattagtggccagcctctggtctctgtggttggagcatcttccctgccaggtggtgcagatgtcctggttgaaagtgaaagacccactgaaagaacctagtggggaaacccccactcaattcccatccggcgtgcacccaagaatctcgaacagacgaccatcttgatgtaaaagcatgaggtagtttaatgacggagctctgggccgacacatatctcccgcaggagacagaggtgtcgaccacatggtggagccataatggcggagctccgggtcgaaatgtatctcacgtaggagacagtggtttcaactccaaggtttggaagctaggggcttttatagaaaagaggtgggggtggggaaggaattggcgcggtttcacatgattggttcatttaaacatcaacagactgtcagaagggcgggagatagagaggcactaggccagtcaggacatgtaacgacgggccttccctgggcatgtcctggcccgttctgctatgttctcagccccaggtttcaaagctcacaaacaactctttgagctatttgacataaattacatgaatcacatgtctcaagttttatttcctttcaccacaaagtgaggacattctgacttaggaaaggcgacaccccaaatcactcacaagaaacagccttgatgcaaaccacaagaggactttcattccaggtgtgctctgggtcccatgctcatacactacacaggggtaaaggaccagaccgtggagccccgagtagctggggaaggggtatttaaaggaaaaaaaaaaaagcacaactcaagggtgtggggagggcgttattggaaaataccaaaaataccagttaagagtcatgaggaagtggaaagataatacctggtaattgtgtggttatttctcaagatagtttctatgagcctctaacaatagcacctttgcatagcaggttccatgaaaggtcagggtgaccttcttttgaacaaacactccctgaacccaggaagctggtgggtgaaggaatgtagttatctgttttataattagcattgagtcacaaaggtcacattctcaagcctgggcctaactaaaggcctagtctttttgtttttatgttacactttttcaaaagaaggaaagggaaatgtgttcaagaatctgcctgtgtgccctgacctgtgtccatgacccagatgcctgtgtacacagttgaccacctatgcatagc

SEQ ID NO: 3426 - DNA, 2803 bp, Mus musculus
gcagaaatagggcagccgcggcagcggtggcacagcggcgggcggcggaggctcggagagctggagcttggactatctctagcacgccaggggaccagccgacagccggagacgacccagccgaggacgcggggtccgggtcgccgcctctgtcgccgccacggggcgctccctcccttccacccgagtccggccacctggtcattccctcggccccggccgccgtagactggacaaaatgaaaccaggaggcttctggccacatcttgccctactcggggtctccctgccggccgtgctgggatggatggaccaaggagccagcagaagcccgaatatggttccaggagagtcgcaggcagaggaaaccagaggctttgaagtcacaagaagagaaggtcttcccagccctgggctgtcagcctcctgtgggaagaaactctgcagccatgggagcaggtgcttgctcaataggacgacagggcagccctcgtgccagtgtctggaggtgtgcaggccccgctacatgcctgtgtgtggctccgacgggaggctctacgggaaccactgtgagcttcgccgtgcagcctgcctgctgggcaagcgaattgtcagtgtacacagcaaggactgctttctcaaaggagacatgtgcaccatggctggctatgctcgtctcaaaaatgtcctcctggcactccagagccgcagacagccgctcccacaaggaacccccaggcaaagcctcgcctcccagaagcgcctcttggtggagtcactgtttaaggacttggatgccgacggcaatgggcacctcggcagcttggagctggctcagtatgtgctaaaggagcaggacatggacggttcactgaacagatgctcacccagcgacctcctgcgatttgatgactataatagcgatggctccttgacccttggagagttctacacagccttccaggtgattcagctaagcctcgcccctgaggacaaggtcagtgtgactaccgtgaccgtgggcctgagcacagtgctgacctgtgctattcgtggagacctgaggccaccaatcatctggaaacgcaacgggctcactctgagcttcctaggcctggaagacatcaatgactttggcgaggatggttccctgtacatcaccaaggtgaccacagtccacatgggcaactacacctgccacgccttgggccatgagcagctggtccagacccacgtcctgcaggtgaatgtgccaccagtcattcgtgtctatccagaaacccaggcacaagaacctggggtggcagccagccttcgatgccatgctgagggcatccccctgcccagaatcatttggctgaaaaacggcatggatgtctcaacccagatgtccaaacagctctccctcttggccaatggaagcgaacttcacatcggcagtgtccgctatgaagacaccggagcatatacctgcattgccaagaatgaagtgggtgtggatgaagatatctcctcactcttcattgaggactctgctaggaagacatgcctcagcgtgggaaacatgttctatgtcttcgctgaggatggcatcgttgtcatccaccctgtggactgtgaggtccagagacgcttgaaacctacagagaagatcttcatgagttatgaagaaatctgtcctcgtgtggaaggagatgctacccagccatgccagtgggcctctgcagtcaacgtcagaaaccggtacatctacgtggcccagccagcactgaacagggtccttgtggtcgacgttcaagcccagaaggtcctacagtccataggtgtggaccctctgccagtcaagctgtcctatgacaagtcacatgaccaagtgtgggtcctgagctggggagacatgcacaagtcccaaccaagcctacaggtgatcacagaagccagcactggccaaggccagcacctcatccgaacaccgtttgcaggagtggacaatttctttataccgccaacaaatctcatcatcaaccatatcaggtttggcttcatcttcaacaagactgaccctgctgtccacaaagttgacctggagactctgatggcactgaagacaatcagcctacgtcactacggctgcatgcctcaggccatggcacacacccaccttggtggctacttcttcgtgcagtgtcaacaggacacacctacctccaccggcccacagctgctcattgacagtgtcacagactcggtgctaggccccaacagtgatatcacaggcacgccccacgtgtcccctgacggacgcttcatcgtcagtgtctccaacaagggcccctggctgcacgtgcaggaggtcacagtgcggggggaaatccagacgctatacgacctaaaaataaacccaggcatctccgacttggcattccagcattccttcacagaaggtagtcagtacaacgcctatgccactctcgacaaggagccagacctgctcttcctggagctgtccactgggaagatgggcaggctgaagaacttaaaggagccacccagagggccagccccaacctggggtggaccccgcagagtcctgagagacagcgggctctttggacagtacctcctcacaccagctcaagagtcactgttcctggtcaatgggagacaaaacgccctgaggtgtgaggtttcaggcataaagggtgcggccacagtggtgtgggtcggggaggtatgaaagttggtaaagaaccaccctcatcctgactccgcagccccaaccaggcgcgctgtacattttcac

SEQ ID NO: 3427 - protein, 882 aa, Mus musculus
HRPADSRRRPSRGRGVRVAASVAATGRSLPSTRVRPPGHSLGPGRRRLDKMKPGGFWPHLALLGVSLPAVLGWMDQGASRSPNMVPGESQAEETRGFEVTRREGLPSPGLSASCGKKLCSHGSRCLLNRTTGQPSCQCLEVCRPRYMPVCGSDGRLYGNHCELRRAACLLGKRIVSVHSKDCFLKGDMCTMAGYARLKNVLLALQSRRQPLPQGTPRQSLASQKRLLVESLFKDLDADGNGHLGSLELAQYVLKEQDMDGSLNRCSPSDLLRFDDYNSDGSLTLGEFYTAFQVIQLSLAPEDKVSVTTVTVGLSTVLTCAIRGDLRPPIIWKRNGLTLSFLGLEDINDFGEDGSLYITKVTTVHMGNYTCHALGHEQLVQTHVLQVNVPPVIRVYPETQAQEPGVAASLRCHAEGIPLPRIIWLKNGMDVSTQMSKQLSLLANGSELHIGSVRYEDTGAYTCIAKNEVGVDEDISSLFIEDSARKTCLSVGNMFYVFAEDGIVVIHPVDCEVQRRLKPTEKIFMSYEEICPRVEGDATQPCQWASAVNVRNRYIYVAQPALNRVLVVDVQAQKVLQSIGVDPLPVKLSYDKSHDQVWVLSWGDMHKSQPSLQVITEASTGQGQHLIRTPFAGVDNFFIPPTNLIINHIRFGFIFNKTDPAVHKVDLETLMALKTISLRHYGCMPQAMAHTHLGGYFFVQCQQDTPTSTGPQLLIDSVTDSVLGPNSDITGTPHVSPDGRFIVSVSNKGPWLHVQEVTVRGEIQTLYDLKINPGISDLAFQHSFTEGSQYNAYATLDKEPDLLFLELSTGKMGRLKNLKEPPRGPAPTWGGPRRVLRDSGLFGQYLLTPAQESLFLVNGRQNALRCEVSGIKGAATVVWVGEV

SEQ ID NO: 3428 - DNA, 429614 bp, Homo sapiens
  misc_feature (1)...(429614): n = A, C, G, or T/U
catacattactagtaggaaggtaacatcattcagctattctgaaaaataattttgctggttcttttattttttggctttttcgtgtaacatttttattcgaaattggccacttttttaaagaagtaaacatgtaactatcatacaagccaacaattgtactcatgggcatagatcccaaaaaatgaaaatttatgttcacacaataacctgtacacaaatatttatagcaactttatttgtaatcaccaaaaaatagaaaaagccaggtggttaaacaaatgtggcacttccataccatggaatactactcagtcatacaaaggagcaaaactattgacacatgaaacaacttgtatgattctcaaggtagttatgctgagcaaagaaagccaatctaccaaaggttacatgttgtatgattccctttacatagcattcttaaaatgacacagttataaaattgagaaaaaaaaatggaggttgccagagattagggataaggggggagggagagagagaagggaggtgggatgggcataaaaaagccacagaaaggattcttgtgatgggactgccatgtatcttcattttatacatgtcaattacctggttgtgatattgtactatggtttttcaagttgttaccattggaggaaactgggtaaagagtacacaagatctctctgtattatttcttacaaatgtatgtgaatctagaattatttcaaaattaaaaaaataaaaaaatcactaagtgatatattggttttcttccatttgtttttatttttatttttattattttatttttccataagttgttgggatacaggtggtatgtggttacataagtaagttctttagtggtgatttgtgaggttttggtgtacccttcacccgagcagtatacattgcaccatatttgtagtcttttatccctcaccccctcccaactctttcccccaagtccccaaagtccattgtatcattctcatgcctttgtgtccttatagcttagctcccacatatcagtgagaacatacgatgtttggttttccattcctgagttacttcacttagaataacagtctctaatctcatccaggtcactgcaaatgctctttttttgttgtttttgttttttgttttttgtgtttttttgagacggagtctcgctctgttgcctaggctggagtgcaggggcatgatctcggctcactgcaagctccacctcccgggttcacgccattctcctgcctcagcctcccgagtagctgggactacaggcacatgccaacacgcccagctcattttttgtatttttagtagagacagggtttcaccgtattagccaggatggtattgatctcctgacctcgtgatccgcccacctcggcctcccaaagtgctgggattacaggcatgagccaccaagcccggccaaatgctcttaattcattcgtttttatggcttagtagtattctgtcgtgtatatatacgacagtttctttatccactctttgattgatgagcatttgggttggttccacgattttgcaattatgaattgtgctgctataaacatgcatgtgcaagtatctttttcgaataatgacttattttcctctgggtagataacctgtagctggatcaaatggtagttctacttttagttctttaaggaatctccgcactgttttccatagtggctctacgagtttacattcccaccagcagtgtagaagtgttccctgatcaccacagttttttccatttataataaaagactgaaagcctgttggtatgtaacaagcaagcacacacagtggttaggtggaggaaggcagatgaggacactgatgattcctttactcagtttatctcttggttgaacatcactgactgctgggatgcttgagactgttataattttaaattggtgtttttcttagtcatatattttgatttgtgcccataataggctgtgtttaaagactagaaacataaggaacctgatgatgaaatacaagctaattaagagcaaaaaatgttaagtctacaattttgcttcaaaattaccttcaccaatctgtaaattgcattcatctgataaaaatccttatatatagactatcaagctgtctttcatacttcaaaaacagtgttaaaaagagaaaaatagagtgacaattatattcagtttggtttttcatgtgttgagaataaaggctgtatccacacccacaatatgttatttgcagagtgcttggaaatagtggcctgaaatctttcccctcctgccatttataaacaaaacatagaaaatatataaataaaatggcagtgttttaaagcatgaaattccagaattttaggcaccaattcttgaaagacagttttttgcctacacttgaggcactgtcaaggattttagtcctaaaacacttttttgtatacattctatcccctaactagatatgacatcattttttagcatatgcgtcagacaatgatgctttatttcatttaattaaatagaaattaaatattatatacttgttaaatgatacaaaatggaacttatctgtaatgactgtattttaagaatgttattaatgattgcattaaagccaattttagaagataacatttaatatgatactctgaaataatttgtttaaacttcaaatcacttatttgttatatactacaccaaaatggtaagactattttaaaatgttttgaagagggttgtagtgaaaggcttgcaggtcacatatggctaggcaatgctgatgtatgtgcatgcatttgtcagctttaaagcatcctgttcatgtcagttgttatatgcccactgtttttatttactgcaattaggaaatggagggtcttagttaattaaatgttctccataactgaaaattaccatatgtctcagcactgggttggagtcaggagacttcaactgctgaccagcttggggttcttggcaaataatgtacaaaacgcatctcgacatggaaagtggggatgatgcccatattaatagcatttgcctcccatgctgtgtgcctgaagccattcaaataatgcatcgggtttttatttacatttcgacttctttttcatttgatgtgttttctactttgagtaacagaaaaacccaactcaattgatttaagtaggaaggaaaataaatcctgaggtaggacagctttagaatgggttatttgcgcagctcattaaggacctaggttctttttctctccctgttccaccatcctccatgagccaacttagccatttacagggtcacaagttggtggctgtgggtctaggggtgtcttatacttaatgaaagtatcaagagggaaaagaggtaccacctcttcctgtgtacctctttgtctccccagctgacactctctcacctctcctcagccagcactgggctccctgatcaccactggaaaagagcttcatgattggcttagaccatgctgaaggtgagacacctgaatggaactgacattctatatgcagaaaagaagagagaaatatactttgagtatccaatcaacaatgtctaccataatttcttagactacatgtttggttttgattttatgtgacaagggttcatgatgaggacaactaattaaatataccaatagattcagaagagaaggttctctaggcacctatttgtagtacgtaaatcctgagatatgtgatagctgccatatacacacacagtgtgtaactgatacagaattgtgtagtgattatgaggacaggctctgagtcaaatcctagctctgccatttgccagccaaattgccttagataaactgggtaacttctttgagcttaatttatgcaataaggatcttacagagttgtcatgaggattaggaaaaacaatacatataaagggctaggactggtgtccaaggcatagttagcaatcaataaaccttaggtgctggttggatggtagtgatgacgataatgggttagacatcactttgcacctcttgacaactgagcatctggtctttcctgctttcactcttgcatctggtcactatcctctctatccagtttgttcttcatacagcagccagagacatctgttaaaaacatactatagatccttgctcaccctcctcccctccatggctttccttacacctaacatcagatctggagtcctttcagtggttcccccttatttgaggtttcactttcactttccacaggtttagttacctgcagtcaatcgcaatctgaaatattacatataataaggtattttgagaggaagatatatatatcatattcacataacttttattataatatattgttatatgttatgaattattgttgttgttaatctcttactgtatctaatttataaattaaactatcataggtatgtatgtatgggaaaaaccagtatatacaggtgcagtactatccatgatttcaggcatccactaagtgtcttggaacatatccccgtggataacgaagggctactgcatttgtcaggaccctgtgtgatctggtccttgcctagccctctccttcttctgcaactctttgcctggatccctctgcttagctacatcagccagttccttctttatgcctgctaggccttctgcctaaatgccctcccagctagatcttctcgtatgccacgccctcatctaatcatatctctgcctaagcacccctgtgaaagaactttgtcctctgccctcttgaaaagtcaccactcttacttccagttacttctatcagtctggggtctctagaatacagaactggaggcaaagtttataagctaacactttatcaaggagaaggaaaatcctagggaagcaggtgcagggaaggggaaagctcaaatgctgagcaggccacagccttgtaacaagtgcagctgtgtgtgtgctgggcctccacagtatcttcaaagaagacttggggcactgcatctccgtagagaccatccagggaaacaagggggaatttgtctgctggcttcctcctgtgcccagtctcccactggtcaaagtccagccctcagggcattaactgtgctgtattgagtagcctcttcaggaggtctctggggaagccagagccccaggtcttgagtctgacaaatgcataggcatggaggccagtttctcgctatcatttggtgcctcaggcaggacttttttttttttttttttttttttgagatggagtctcgctctattgctcaggctggagtgcagtggcacgacctcggctcactgcaacctctgcctcccgggttcaagtgattctcctgcctcagcctcctgagtagctgagactacaggcgcgtgccaccatgcccagctaatttttatatttttagtagaaacggagtttcaccatgttggccgggatggtctcgaccccttgatctcatgatccgcctgcctcggcctcccaaagagctgggattacaggcatgagccaacatgcccagccagacaggacttcttgatctgaagtagtggcagtaacagcagaggggaactggctctaagactgtggagatggcatggaacagttaatagggccactcttgctaggaagcaagacaagtaagtgtccaaagccctggtccaggttagggtcaaagaggtcagaatggctgctcagatctagggtggcctatcaactaagtccagtaccatcttatacccctgaaggttggatagttgtcttcatagcccttgaggtgacccatcataatactgcatattcatttgaaaggaacgtttatttagaagaatggaagcttcagccagccaggtagctcatgcctgtaatcccagctctttgggaggccgaggtggggcaaattacttgagcccaggagttcaagaccagcctgggcaacatagggagaccccgtctctacaaaaagtacaaaaattacctgggtatggtagtgcatgcctgtagtcccagctattgggaggctaaggtgggaggatcacctgagcccagggaggttgaggctacagtgagctgtgatcccaccactggactccagcctgggtgacagagtaagaccctgtctcaaaaagaaaagaagaggaaaaaaaagaatggaagctccctaaggtagcagttcacctttaaaattagatagatagatagatagatagatagatagatagatagatagatagatttagattttcacattatttatgattctatactggtgagttggaaaacagggtcatgataaaaattatgttgtccctttcaaagaaaggaaattggcccctcttttcactctcctcttaatatgttccctctttcatcccttttgcctatactcagtagggtatgatagtttgtggctgtaggcctggccatctcatccccaattatcccttgtaaacaatacattcttaagagtagcagacttcagtttcctcctgttatcagcacctttcttggtccccttgtgccatcaatccagcccctgtgagtttgctgggaatttgccttggtaacaatgccatggtgagggttttatgttcatctccctccatttttaccattcacaattccctttccatcactgcatcttctcatttatcccaacttcttcattaaaattcctactctataccacttcttctttgtctcgaaaaatttccccaatcacagttgtcccttgaatgaataccttatctccatgctagctacttttctccctgaaataaagttaaaaacaattatgtatgtgtaatcttaagtctaggatcttgaacttactgcctacattcccttaatttctagatgattaatgaattatcatcttaaaaataagcattaatattagacttagaggaaaacttcaacatcatagctctgtttagatcagaataactgaacttctataaatacaggcaaaataaaggcatagacctttagaactgaaaatggccttagacatgtcgtttagtatgactgcctcccatgtacccattcccaattcccacttaagagaaaacaagttctgggaaaggtgtgactctcccaggctcactgagccctagaggctgaggcgggagagagaccccatccttgtgcctcccatccagggctctcctaagcacagggctggctcttcagtaaactgcatggtttggtttgaagatttacaaaaacattttttgaacaggcagcagaacgttaaattatgcaagacaaggaagactctttcctgccttttcccaccttctcacatgacttcccagtctggcttctaatgggtatttctaggcactgtttgaccagcctagtggggactcccaagggtaagctgacccacagttagtgatgcagatacttttggttggatctggagaaagtgccttgcttcctcctgattcccatggctatgtgtcatctctgagtatcctgatatgcaggtgtaatctgaaatgtcctaagagacacacatcatttggcagtagtttttcattatattgttgtgtttttggtaaggattagaaatagaaaaaagattttaaaccagcaacgtaaaaaaatatttgggttgcttaaactttttgatcttgtaaaagtatattaataatgtttttatgtgtgtctctggctgaaccactcaccaaaaacagagtggggctggggggcagtaactggaatttatgtttccttttagctcccctattccaagcttattgaattacatgaagttcaaaacttaaccattatttcccctaagaatcctagttggctattgagaatcagtatgcttgcaagttctgaaacagggtttcaggcaaattttgaaattctcagtgtgaaatctagcctattttccaatttggggtgtactattaaacaaaaaattacactgagaggtaaaagcacagagcaattcaaagaggtgtcaaggttactggcatctgatgctgcttccctggagccttgttttattttgtcattcacacttcacctttctcattccgaggtgacttttaatttcactcttattttatgcacagtagttaaacagctcacttcagatgttagcattctctctaaggaatattccatacatctggtttgcagcaactaccttcttctccttctttgggaagcgtgtagaagttcagtgcctgttcactgcattaaacagagctatttctgatcttggtcaacctatagaccctgatttacatatgaccttgagttactaaaaaacaaaaaatacacaaagtcctgctttgattatgtaataaggccactaggctgactcagggactttgtgatcagagctgagaatagaaatctgcttttccaaatacctcatgtcttagaggagagccgaatccagcctctaagccatggtgtacgttcctgaccacagacttagaattacatttcagagggaggcacagcacatttccaaacttccctgcttccttttatactcattttctcttttctgtttcccaagatgaaaagtgccatcccttccccagtcctgccatggagaatctggcccctagccagccccagaagttcagtcatggtggccttggcaaagattcatagtcaaatctgagagaggatcacactggctagggcccagggtcactgaggatgtagtagcctttatccttctgagtaaaaatcatggtatccacatgggaagtcaaccaggttttgtccaacccctcattttacaagtggggaaactgatacctacagtagagatacgattggctctgcattacatagcttggcagtgatagagggagagctggaccccagaccaaaactgtgtgatgccaagaccgcgctggcccattcactgctgtatctctagcaactattaatagcacagtgcctgctgcattggaggggttcagcggcaggaaaatctgtggaaggaaaaaacaaacgtaatatctctttcttcaggtcagccttccattattcttccccttttccttatatttaactaacttcatcctcagaaaaatcccctctgtcacctccccccggccaggagagattacagaggcatggacagaacactgttcacctaagccaggaaggcccctggtgcccacgcagccagagcaggaggcaggccctcagaaagtctcctggccatcagcctggcctgggtaggggctccctcctaagtttcctgccagactgaggctacgtatgaccatttatgggcccctagttgttacaaaggtgtttccagttcattcgggaaggaagactgatctcaaaagctgctgatgttaaagagggattcagaaaagtttgggagccccaggcttggggatgggatcaggatggggaaatatcctgttctaagggagaagggaccctctgggcccagctaggtcaggtaggcaaatgtcacttgggattgcccctgtatgccctgaatgtcttaagattctgtagttggaagagggaagattcagaaaagagaaaacctttgctgtttcccaggttgttgggtctcaacggcgggggatttcacccactttgtccccagggacagctctcctgctgtggtgtaccggcccgcctggactccacgagcaatggccgcggattcagagaccccctgtgcgcctggagagcacagctttggggaacctggcccggaaaggagcctggaggagagcagaggtgaagaggggctgtcacttgccgagctccacgctagccagaggcaggagcgctacgctggccctcctccctccgggccctagatggccccagcgctcccgagtcatcgcgccccgcgtgcgcgcccgcctgctccgcgcacctgccgtggccgccgcgcgggtctgaccggctggcgggcgggcggcgcgcacaggtggcggcgattgggcaggcggggcccagagggtgacgtcacgggctccggtcccggcggcagaaatagggcagccgcggcggcggtggcacagcagcgggcagcggcggctcagggagctggagcctcaacagcctccagcgagcccgggacccgccgacagcccgagaaaccagccgaaggacgcggggcggggtcgccgccgccgccacggggtgctccctccctcccgcccaagtccggccacctggtcttcccctcggccccggccgtctcaggtacgcgggcgcagctcccagcgggcgcggggagggtgccatgtcgctggcgccgccaccagccggtcccgctgcaccccactggggtcctggcgcccgcggccccgcatcttgctgcagggcccggcgcgggcgcttgcttgtccttactgcccgcgccgggaaagccaagtttgcccgcggggaagggaccgctgggccagggctcggcagggctaccccggccaaggccaggactcgaggagaggctgggacgccgaggctcgtggccggggtctacggtggggaccggagtgacccggttggcacgccgggcgccacgcagaagcgctcgggccgagcccgcagctcgcgcccggctccgaaatcctgcaggcgccgttcttgggttcaggaccccgagcggccccggcggagccaggcgagcgcggcccctcggcccgggcccggtgcccttggctccgggttggggcgccgggcaggcattctcagcacctcctccccgcggctttgcggggaaacttgcgtctcctcgctgcagcccaaagggcccgctgcgcttcgcctggccctggcttccccggggtccgccgcatgtgaggctggggaggaaggaatcagggcacgacccgactccaggcagcctgcggcgctgcttgtgcgtagccggccgcggtccagagtgagcggcccggggtacccgcttgaacgtgtctagggagcagtgtgttgggggcgttcagcgttcgggctgggggcttggtcctaagagagcttgcactgtggatgatctccgccctctttgcgcccgcaaaacaaagacgagttctgagtttcaggagggacctggacgaggcaggcacagcactctgctttcggcgcctgtcgcctcgagtttggggacgagctgacgctagtctttggggctccctgcagccgacaaagcggcgccaaccccaggcctgccacctgaggactttgtgcccgcaactcttgcgggagcggaaagccgccgaggcagtggggtttcttgttttccagagcgcggcgagcctccgcgcggcgcggcaagtgcactaggagtgcgcgggtcagcggggcgggcccggcgaggtcggtgtcgcggctcgagagcgggtgccggggcgctgtccagcagccctcgctcgcggccgcgggccgccgacactgatgaatggcgcggccacagcccgccgctcccctctaggtgtcgcttccgccgagctttcctccagtgaaaaacagcgccggcagcttggtctgttaccttcgtaaatttgttgcaagcctgtgcaccaggaattgtactagatggggcccccgagatacaaacatccgtccaggttctctgggccaaacgtaaacagaatttcaataggtggtgaagtaactgccagccaaaatgttcaccgggaatgggcctgtgtcacaatctgtgaggggaaaagacggatcagtgagcgactaggactcttcttgaaagtcctaagttattttcctactgccaaatttaggggaaaccagcgatgctttttaatagtgtcttcttaatcctgggagccaggcgccagtttctgtgcctgcccctctggcccccaggacagactctgggtctggttggcggggggtccacctgggaagggaatggtcggaggtgtgagtgatgcagcttctgagactccagagccacagcaactctcaggcaggagctcaagccggacatacgagcagatgccctacagggcacgtgtctgcttcccatcttagcgttgtgagaaggaggcactgcagcatcactagaccatttctgccatactctgctaaatgttcgctttttccctcccatcctaggaaaaaaaggcaccaccctctccaaagacttcagactgagccaaagttcacataagaaaatagtccactttgatgtaatgtatttaaattgctcgttagagttgtcctagtgcttttttctctcttagacttttatgatcatcctcaatttttgttgattctaggaaagctctttttcttctggaaaaggccagcttgtttttctgggtattaggagaacttttatcctttcggctgtgccctggaggtgggtgagggaagaggaggttggatttttccaccatgaccagtcagtcactgaggactttttttccttttactaagggccgtaggactttttaaatgtgaccttcacgttatgatcttttgtttgacttaacactatattcagagactagcattgaatagtcattgtttcataaaactaccttaactcctaccttgccttgtttgagtgtttctctgcaaactcaaccttcttgagttgcttatgtgcggttagttgtgtgcttcctagcttaatgcaattagatatttcaagagcacatctttctttacattttctgtctcaatgcataacataaggcatggaatttccaataaaatagaactgcaatcaagagcatgtggttcttaagaggtatgagctgaaggttgtaaggataaaggttattggaagtcacatgtgtgtctgtgttaaacgtcagagtaaataggaatagagatttatacatggcacatagaataatgtagccatctaatttatcaagtgttggggaagaattaactaatgatatagagtagataattaataggaaatgcaatttaacttcattagggcttgctgcaacgttagcttgctatatctccatgcctaatttccctgggttggtgttttagggactgtcttaggaaatctgtaccactttctttttttctaaaacactcacatatcaaaactagggtcgtaagcctttgagaggttcccgtacagcctcctggtttcacgctggggttgatgtggctttttttccccctttaaatttgagcagacatgcagaagagaattccacgttgtattcagtcagtatttggaattccagaatcccagttgatttttatatgttgattgccaacatgccatgtatgaaatgctacacacctacagtgtgtgtagggcagacactttttcatttggaaaggttgagaatgcagatgcttcagggtcacaaatctgactgttctcttcaaggctgggtggcattgcttggttctgccaaatcatctttgtaatttctggtcctgttgattacaaaaagaagccatttctgtatggctaatccttaatggctagtctggtaaagttaccaagttctgggagagaggctgagagagagaatggatgaacaatgccaccgaaactctgagggccagaattcccattcttcccaacagggctgtttcctggaatagaaagagaagtttgtattaaacccattgccagtttaatgggattgcttctctctggcctatgaacttggtcaataaagacagcttacatgcctgtgtgcgttctctgggtggggcagattttggtattttcatatgaatacctatttctccctaacaatttgcattcctatttcatgctttttcagctttcttcaaaaagcaagtcagtatttggaatgttacatcatactaacctgtaatacctctgtaattctaaatacagataaataatagcacagatattagcttattttagaacacctgaaaatcctgtggttttcacaaggaggtagacaatctagtggaggtccttcagcattgagaaaagcaaaatctgcctatctaaacaaagaatccaaactcccactctagatgtaagtgtgccataatataaggaaccaaacagttgccctgggggcaggatgcctgggttccagtttaggcctagccactgatttgtccttgaacctgggtggattcgtccaccttctggtcttctggtgtcctatctatgcggcagccaggttagcaccaggttctcctgactgggggaatgtctgttgaagctctggtaggaaaccacaggggaagcaatgaaacacctcccttccaaacaagatggttaaagcatcaagtcagtgtactttatgacttgtttggaacaaaaggtagtctcagctctttatatggggacagtcctaggtagatttataattaatacttagggcttagcaaggattgaatgaaacttattaatctaaattgatctcaaaaggagctctaggtttaaaaggggatttgtgaccttatggatggcaccttcccaattctataatggggagattcttgcatttgcctctatctgaaggccagtaggactatttgaatttgaggagtaattaatttgttaacagatttacttctccagagtgactagccttatgatgctggtgctctccgtgagctgaggggcatcggcctgggattctgtgcatctttttatggttcccctccctccctccctcccttctttccttctaccgtattttttcttagcccataaatagagcagcagtgaggactgaggagagtctgcccaggggcccccatcccggggtagaatgtgggaattaagggtgagcagcttggctctctgcccttggttggagccatgaggaggagagtagctcgtggcagctttcagaggaaaggagagtctcggggccagggcctcctatcttactgtctctagattttccccattatactaaaaacaactgtttatcaaaacaaaacaggcaggacaaaacaaaacagacaggcggcagcaggtgggagttaagagaatagatgtcgtgggtctacgtgcctgacttggaatttcagttttgccacttgtctgccacatggccttggcagagtccttaacctctctgtgaccccatctcctctttcatctgattgagggataatcattgcccccatcatggagtagaaaaaggagggttatgagttaatacctgtgaagtgcttagaacagtgcctgacacatcgtaattgctatataagtgttaaccaaatagatagtctctatttgattattagacagataatcaaaattgatttagacccaatattaattcctttttatgaactgaactgtcataaaacttgagctgtaaatttccaggctgttggtgctgtagatataatgaattgtcaatcaccgttaagtataaaatgacatctaaaacacatccacagtgcaaatgaaatcacagctagtggtagacagactgagctaaactttacaaacaagctgcccaggagtatttcagtagttggcctggctcatgtgttttcctgtttccagagttttcctgtttccagatacaatcttacaggaaatataaacacaaaccagataaaaccagtggcaactccaggccaagctccaggcttggatcttgggcctcctgaaacacaacccagaaaccagcagtcttggtgcatcctcttatgaactgatttggcgcttgccaaaatcacagttgaaatgaatatattttattttaatgctacccattagtaccaaaacataaaacataattgatcttagattacaaagcagattaaaagttaaataccagattttgtggcttatgtatttcataactccaagagttgacatctgtacattaactagaatagatttggattatcttgctgtttttcgtttatgtgagctaggagacatggaaagggagaaaagtagaccttgctctgtgtgtttactctgtgagcaatgtttgatagtagataagtaggacaaaattaatgagaataagaagcaatgtctttctagttctagcttaaatttctatggctggtttttaaaaattccaaaaatccactcgctgttttctgcagtctctggaaagtggctctgcattcagaagaggattacttatggagaatagggagttaccttgtttatttttagaaaaatgggttgcagctcagctgggcatggtggctcattcctataataccagcactttgggaggccgaagcaggtggatcacctgaggttgggagttcgagaccagcctgaccaacatggagaaaccctgtctctattaaaaatacaaaattagctgggcatggtggcgcatgcctgtcatcccagctactcgggaggctgaggcaggagaatcacttgaacccaggaggcggaggttgcagtgagccgagatcgcaccattgaactccagcgcaggctacaagagtgaaactccatctcaagaaaacaataaaaacaggttgcagttaggggaagacatttttattcttagtcccgaatatgattttcttttcctgctccttctccctgtaagatttcacacaccctagctagatcactggatcaagagcgcagaagccattggggggcaggggagggagtgccgtgactgccgcagtcctcacagtcctctcccgggtggcagctgaagcggcattattccactcaactctgccttcttcagagtgtggggcaggtgctgatggtgagactgtgaccttcagattatatttactgaccacccagactcttttcctggtagctcagctttgtcaacagatgtcaaagatgagtgaccgaagaaacagatataagagtgggagcttatggactctttttaaaacaagcagacaccttctcttaaaagacagtcatgccttataaccttgccttttcataggccagtgccataggcccacaattttgagtctgacttctcctccctgtgggcatttctgtctccagctggagacataaagcagatgtggagaggcagctctatttggatgtggatagcagccaaacaaaacctggaatgtggcaggagtgtaattgtttgccagccctggactcagcactagtgactatgtgacaacttccaccccattgtctaaagtagggatgctccaaagctgttgcctatggcagtgagcagggatggactgccaggtccctcaagcacccacttctttctgaattggatgtctgttctggaccagccctaagccagttcatgctggatgctggcctccaaggagctccggtgtctttaactcaccagcctagatcaggatgcagtgtggaccatatgtgattaagcactaaattgtgtggtacaagcagaaatcaataacccctaaagtttccttgagtaggggttctaagtactacataatgagttgtatctggttatgtttcataatcagaatactgaaattatggttggactgtgttcacagtggaaaactttttccaaaaaagtacagcttattggacaagtaagatagtctgtatcctcatttcctcagcacaatgcttagcacatgatttggacttgaatatttgttgtagctgatccttagttttttcatccatgtgattatttgattaccttgaattgctcacttcttgtcttttaggactgtatacagtaatgttatcaagtgagcctcaggaaacacctcaaaggttattgaaattctgttatcattggatgcttggattctgccacaaaaaatggttggtcttgaaactaagatattagaccttatgatgccattttgaagctcactgtcttataaactgaggtgtcggctgcaaatgaggtgccagagatgtaacataattcttaatcatcatttctttttttgagacaagagtctcactctgtcgcccaggttaaagtgcagaggtatgatctcggctcactgcaacctccgcctcccgagttcaagcgattctcctgccccagcctcctgagtagctggaattacaggtgcctgctaccacgcccagctaatttttgtatgtttagtagagaccgggtttcaccatgttggccagactggtctcaaactcctgacctcaagtgatccatctacctccgcctaccaaagtgctgggattacaggttgtgagccactgcgcccagccataatcatagtttctcgagcactaattgtgtgcctagccccaaatgctttctcaggaaactaaggcgtggctatatggcagcctaatagaggtgacccacctgcctcaccctggtttgttcttatagatgtaacggtaggtggcatttcaaatgggtttccacgtaacagcatttatagagttcttactctatgcctgacactaactccttcaatcctcacaaaagcctttcgaggtacatattattgccattttagaaataagtaaactaaggctcagaagtaatataacctctccaaggtagaacagaagtttggtgccaggatttaaacccaggcttatctgattctggggaacacatactaactcactgtgacttattatatccatctcataatgttttattctcagcatttgtcatttcttcaacagactcatcaaaatgaaaccaggaggcttttggctgcatctcacactgctcggagcctccctgccggctgcgctgggatggatggacccaggaaccagcagaggcccggatgtgggtgtgggggagtcacaggcagaggtatagtcaaatccctgcggacataacatttcaaactgattgctttccgatgttacagtatctgatttcccctccacctttagtttagatcagttagatcacaaagtgaattaaaattgcacttcctttttggtggggacagaagaaggcaacctgtgtggatacagacaagaggttgataacacgacgtgagtaatggctctaaaacctctcagatgctgaaagtgtattccgaaaccaagcttgaattgcctggttagtctctacaaagaccctcaggagaatggcctttctgtatatttaataaaactctgaaaatgcagagtaattggtggagcacacccatgtgaattagtgaagtattttaattataaaatatatttgaaaagaaatggactacttttcaggtatatagatagaaagcaccaggctgagaaagaactggcaagtggaggtcctaagggagagtgctttaatgaacagataagaatgattaatggcatgttaggtatatataaatgcttctaaagtgcttgaaaaacttgtcctcaaatacctccctggagagtctggatgttctgctaattgcttagtgaaccctggtcttatgtagtaaagaggatccataaactgcaacctggccctctccaaggtagtaggtcccatgaatttggggttcatgggcaaaatgtatttttctgcagaaaatgctttgtgtgtgctgactcttaaggaatgacttcacccttccattaaaaccacctgggattttctctatgctgtgatgaatactaattcctaataggcagctttccagggcacttttcctcccattgtcttccttgatgcctgccgttctctttttctttgtccctgtttcctgtcctgcggaatgagaaataaaaattacctcaaaaagtcaacattcccagagagtgaataaggttactcagtgtagggtaggattaatgcattatttgatcaaaagacatgatttctctttcattattacttaattgtaatgcaatcccaaacctaccagccttaatctttggggagcctcagaagtaatttaatgtacacttttcctgcagaagttagtgtgccttccttttgtggtgagcagatgattaaacagaaacgctatctctgccgtctaaatccatgaaggacgcaatttaatgctcttttgaaagagtctggaggctggcttgctggtgagaacagcatttcccttatgggaacagctttatcagtacactcatatccataccaagagaaaatgatcacttaaatcctacacatatattgttgaatatttaatagcaaagcaaacagacaaacacacaggtaagcttagtcttcttactattggggctcatcggcccactgttttaaaccacttatttcaaataaaagtatcaagtcaattaaggtgggatttagctggaggtaaattgaaggtaagttaatatcaacccagggcctctttatcttagctgttaacaccctaattctttgtgtgccaacaagaaggagcagatgctggtcattgggaggaagtaacgctttttgggggttgttatcttgctcccctgcaacccctgctccagggtagcttttgtcttccaagtccaggaatgttgctgcttcaggaaagggaggtgatgactgtgtagattctgcaccacaagaactattgccctattgatcatatatatagttttttgctatagcttttgtttttgcagtattataacttctaatcattgaaactgtttctatcagtgattaaatgagatgataataatgggaatgggcctagggcttaggatggcctaggttaaaggtttagctgcagagaacagaacacttccaggtacggtggctcacacctaataatccaagcagtttgagaggccgaggtgggcagatcacttgagcccaggagttcaagaccagcctgggcaacatagcaaaaccctgtctccactaaaaatacaaaagtgagctgggtgtggtggtgcactcctgtagtcccagctactcgagaggctgaggtggcagtaccacctgagcctggggaagtcaaggctgcaacaagccatgattgtgccactgctctctagcctgggtgacagagtgagaccatgtctgagaaaaaaaaaaaagaaagaaagaaaaagaaaaaactcgaaggaaaaaaaagaaaacagagagcagaacatttattttaatcggtttgtttgcagcccttgctcacactctgttcatccctccatgcacccccatgcccctgcccaccaggggcctcgtgcagagcgtgctgtctctcctttctatgtctttgctttctacacctgactctcctcctccttcagggcccagctctggttcttactttttctttagaaccttctttgaccactcttggtcacacctggtctctttttctgaattcttagtccttcctttctctttttgttttcttactcttttatttttacgttagcatatggatggagcctgtcttatttatcttttcttccttacagtgcctaataattttataagcaaaatagaggtttgatgcatttttaagccaatcgatatttatgtgacctttggtcctggtcataaagtcactctggtgcttccaaaattcagaccagaccatcaggtatttcagcgcagggcatacctccctgcacagcaggttcattcccagtggggacgtggatggttttccccagcaaatctgtgagcagcctgcaggccggacaggcttgcatcctaatatccaagatagtccttgcgtgttatagtttctgggtagtttattatttgaactgtagctattaatgtatcgataactcacagtccaaaccatattaaactcctctagcagtttctgcagacagtcttatttcctggaagaatcaaaaccagcagagtttcctgagactctaaataagtgaaaaacctttttcaggaaccagatattaaaatgtttctgcatttcttcccagtagtagtacttcacacaaatactcattgacttaagatttttaaagtacttagaaagcgttaataagatttgatttacctttaaagttattataccaattacttgattgacctaagggtaaataagaattaaatgaccaacgcgtgtgtgtgcacatatttttaaagcaattatagcaagtgttaaattattgttttatgtacaaagactgcagtggaaatagtttcaaggagtttaccattttacagacatagataaaaagaaatacagctgggtggagtgcctctttcataagagtggagtggcagaacgtgccctagaatactaatggaattctgaattcagaggaaacaattctgagaggtacaatttattgaaataatgaaatgttgttatatcccccccccctttatcctacacagatgcattttgacttatgacgggattacatccaaataaacccactgtaagttgaaaatatcataggtcgaaaatgtatttcatacacctatcctaccaaacatcgtagcctagtctgacctgccttcagcatgctcagaacactgacattagcctacacttagggcaaaatcatctaacacaaagcctattttataataaaatattgaatatcttatgtaatttattgaatactgtactgaaagtgacaaacagaagggatgtatgggcacttaaaagtacgatttctactgaatgtgtatcattttcatactatgctcatgttgaaaaatcctaagtcaaaccaaacctaagtcagggactgtctgtacactggtcaagataaatatagtagtaaaatcaatattgatagaattctgtatttgagggggaaccaaggaaccaggaaggggtgagaagtgatatggtagcagcctccagagagcatacctgcttttgagaaataggcatttgtgggagccccccacttttggggcctgggtgctgcagtggccgcccccccacttttgcagcctgggtgctgtggcgggagcctccccttttggggctagggtgctgccattggagccaccccatttttggggcctgggtgctatggtgggagcctcccacttttggggcctgggtgtcgtgttccagcaccagcatctcacccatttgctgggctctgagattgaatggtgggcgttacatggtcttatacgtctttcatgcattttactgaactttttctaaacgactcttacccatggcatatacatagtcacgtactacatacctgtacatgttaatattgattctttcttaaattgtcacctcatgtgcctcagtgcttatagaccagagataggttttgagctcagacaccatgggttttcagtatttgcaaattctctcaaagtaaagtctttgcagaagaaatatgtggagtggtgtcagctaacttaaacatgattccccgcctccctaacctcaggggtcagcctaagacagcattgatcctaccctgactgaccggccccttccccttgctacaagtgttgatggcaggcatgacactcctgtccccgcgaggcatggcaacctcaaattgcagagtcccttagatgctccgtggcttcgttccgccttggctgggcattcagtagtacttgggctgctaagactgagcactgatttttacaaaaacactttcactgttcttatgtattcattgtcttaacgctagtgtccctcacccccaaccaccctttctgataaaattctccccaccacccataaccctgactgtgctctttgactgattactggggaagaacagctggtcgtctgtagggcttgagatctgcccgttggtgtttgtactcaccctggccctcagctggtttgtgggcataaataaaaggaactccctcttcccggtgaaccaacgggggtccaagctggacgttcgcattttcttaagcctcacctacagtacgtgtgcatctctcatggcttttctgccgcatcacccttgtgatactcaccattgcaaattctagtacttgacttgctttcaaagaagatgagaccctgggcaaggtctctcagcaagaggcgagaatggtctccccagggccgtggacccctgggataaccgaaccacgtactcctttcaaaaggatccagaacttcctctgcaggtgcggtgctggttgatgtgggggccacttctctgggcccctaacacttagccagggctttctgctgattattctgagtcagaggatgtggatattcgtttttcaggtacaactgggagggcacaacctcccacctatagacgttatcagtacatttataattttcaaggcaaatgatggtggcagaacctcccaaggtctcaggggcattgggattaacccattcccaattgcagaatggggtgtgctgtaacctgtgccagcacctcttgagatgcaatgtgcttgtgaacggtctgggatcttgttaaaatgcagattctaatgcagcaaatctgaggtgggtcccaagattctgagctccaggtgatgctgatacttcagatcctgggggacactgggaagaaaagccttagaggagccccctgcctcctcccatgcacacacacaaggagaatcccagttggattgactctggcctttttttagttcttgctgacatgatgctgactgcagtcagggaaaggagagaaatgggcaggctgcagtcatgctggaaaatagcttgatgagactagcttagtgggcaggtaggtgatgggaaagatgaacttaaacaaccttggttctagggtcatttgcacctgttttcaagcagctggacaggtaactctcactcttggaacccgtggctcctccctggcttgtctgtaggtggttttaaattctgaaagaggtgattttaaatgctgaggcttagcccacaccccctgctccaaggaccaacagcgcactcacttctcgcttaccaccgtggctccccttctggtgtcctatcccatctctgtccctaggcccagccagcctgttttggggatgagcattgctgcattggtgagctgttttggagtcttgtttttctctttatccttgaacagggaaagtcactgtctttgttctttgtgtcctctccactgctcccagccagcccttccacactgtaccagttagtgcactgtgtgcctctttggtattttgagatcatagttgacaattttaattggccctgaaaagttctgtgacccaggaaaatgagcatttatgagttcacagaaacccattatttttcttcctcttaatttagcatttacttgtctaactactttatttattcctctgttgctaaattatctatactcctgtaggaaacttcccacccttgtaatgaagacatcaggctgtgcattgtaaatggggctccaatttctatttttcggggagttggcagcacagatctgccaagtcccaatcatctgcttgatttatcccctacaccctgtgggttgttgcttttgcttcccatttggatggaagtaaatgtcgtccttgtgtcaggcaggctctaacaaggcccaatgagtgggctctactcttcaggcctgccaagccagagccattgtccttctgcctccatggctgtggtctctgccactggctcctgggctttgtcttgtcaccagccacctgggaggtggagcatactggaactagacatggaggatgtgggaggatatgggcccagtgctctgagcaggcgacaccgagaacactgtggtgggtgctggcacattggtgttggggggaggaagtgtggccaggtggctgagaagccatctgtccaccagcctcgcctctctcttgatgggtagccatcctttggggcattcccttcagtcaggaaggtctggaacaagagaaacccaatgtctttcctcctaataaaaatcagccttgttttactcctgccaggagtgtgtgctcttggcagaggtgaagaatgagtgtgagtggcctgcggggctgaggtcttccctcaatcacagggtgagtttcagtttgatcttgcacaggggttggggttgggagagctggtgctggtgcttgctttggttaggagactctgagagcattgtcttcccttggtcggtgggaccgggctaaggtagcccctgtctacctgcttgatgttgtgtctagacactgagcccttggcttttcttcctttgttccaagagggccttgggtgcaaatcaaaacccttctggagggcttagctggagacggaagctgccattgttgcttttgttaaaatactttgaaggttaaggttttgtgttatttgggatctagattgaaaactgtgtgtatttttctttttaagagttgagaatggaagtcatattctatttcttgcaaaagccctttccagagaatcagtgagaccaccagtgagtctgtgatgcagctgacagaagcgcctccccacctgtgagggagttggcctagcctcagaggtgacagacgcctccagcacaacccacgcttcagccccagccaggggcctgggcccctgaagcatggcctgctttttcagaggacgtctcttccctgctcaggctgaaagtcctcagtgcttctggtggcctgcttggctggtggcagggctagctgctggtataggcaggctgatgtgcacggctctctaggctcctgggagaaatggctgctgtcctcctcccccaccatagaaccctgttaactctcaccttgtgtgtttcatgttgccactttctcctccaggatgtttgttgttttaaaaccccacaattggtttttcctgttggggctaaatcactttgcctcttgcctgtgctgccgcctaaggcatccccggccctgcctttgcttcaagtgcaccctcaactcagagggccccggaggctaaaatctgtttgttccctagccagctttggagctaagggaatcgccctctccagcctttaggtttgccacgagtgaaatacaggcaatataacaataccattttcagggttgtcatgagcactaagatggtacatgaggtgcccggcacagattgcctccacagaacacaacagacagagctgtggttttgtgtttgtcatcccagaacctcagtcagtggctgtcaagaagactgtgcgcccttcctgagccacagtctgatgtgtcaacttcagctgctgcagttcttgtcactgctggccatggccacatatcacgtagcaaggcagccctcagagtgggagggtcctctttccagtggagtggtaaatatcttgggactgggccccatatcctcagtgtccagaaagcctggcacacagcaggatgttcagatatttgttgaataagtgaacgagtcagccatcttttactattccttttgtcatcgtatggggtttggacaaggtgtcttgagttttgggactccttacataagaaatcccaggagatagtcactggactcccttgggcttccacatctgatagaatcccatcagtttcaaatcttcttaactttcttcttgaaccaggagaggcttcagagaatcgtatgggatgtgtgtaggaacaggtgggaccctgactcagttgccatccccttcctagaatggctttgagggcctgcttggctctgactgtttcctctgcagaggccagcatcactggcaggcagccagacccttgccaaaaccatgaatccagagagtgaaatgtaaagtcaaacaaatgcaggatgctttgtttgtgcttagaattttcagggtcagtagaaatagtctgtggctccggggtaggtggttgccagccatcctcacagagggcagaaaggagcagaactactcttttaaaatgtcattaagtaggtataagactcctgatggctttccttaatgccagtcttaggacaattgaactgaaagcttgtttgagctctgctatcatttaaagcttgctctctaagtaaagagaacagaactctttttccatttatttctctttctggccttgcatttaaacgtccttgaaaactttggtctctatagaaaagatgtcaaatttctgttggttctgctgatgccacattttgaatgtccattccaggtaagtaggctttcatgtggggatgctgggaggtgtcaaacgggagaggcctgccaggcagatactctaattagagtggctctaaaatatgccccatggtgcctcctcttcttcctctgctattttctgtttggttgttactgctgttctcatattagcatttgaagagtgaagagcaggcttctggccgggtgcagtagctcatgcctgtaatcccaacactttgggaggccaaggcggtcagatcacctgaggtcaggagtccgagaccagcctggccaacatggcgaaacccagtctctaccaaaaatacaaaaatattagctgggcatggtggcacacacctgtaatcccagctacttgggaggctgaggcaggagaatcgcttaaacccaggaggcggaggttgcagtgagccaagatcataccactgcactccagcctgggcaacagagtgagactgtctcaataaaaacaaagtaggcttctctgcttcatgcttgagtgttcatgcctggcagtatggcttaggatcatatctttgtgtcctgaagcagaaattcccatttgactttctcttatccctacctagagggtctctgagccctgggctggcttggccaatcgggacatctggttgacttaaatcttagtaatcaacagacacccactgagcacctagctgtgtgcctggccctgtactaaggctggctaagtggttgaagagaaatgggatttgtgattctatccttgaggcttgagggccattggggtgggggtgggaggtaggagcaatcagctgcttcagaatggattccaagttagcagaaggaatcacctacattagttaatgatctttttctagtctgtatataatgtcgaaattaagatctcaactttagcctaaagaaaagtgggcatatttattaagtaataaagaaggaagtacatctttattagaaagaagtacatcttaataaagaaagaagtccatctgcctcccggattccccacgcctggtcccaggacacttgtgctcatagtccagacattccctgtccaggtgcatgtggctgatagcagatctggtatcacaggtttgtcctggcccctggctcagctgttctaaagtccttaagagtgcgggttgggggctggaggaagccggaagtctctaggtgtcacctgcataggatggacatagtgctgaatgcagcagccctctggtgtccagaacctccaccagccccctcctttaccgtccttcaacactccctcccaaaacttatccaccagagcctgtactgctctgggacctctcccctgaagtggttccacctgatatggctgtgttcttgttggctcagtgacacctaagctctcctcagaggacttgggctggcagtgtagaggatgtgggtgctcattattagtggtggacaagtttcagggccaggggtggtgttgaaagagggtgaagaaaggggctgttgaggttctggacacccacagggcagccacattcagcactgtgtctatcctatgtgggtgacacttagagactcccagcttcctctgtcgtccttcatcttgcttagggtactgcagcatgtgacactaccaccccggtggccaaaactgtcctattggaggtcttattccttgctgtagagttgcaccttggtccaggtatccttcctggtccaattgattgtggccaattgtcttagcccatttagtgttgctataaaggaatagctgagtctggtaatttataaagaaagtaagtttatttgactcatggctctgcaggctgtacaagaagcatggccccagaatctgcttctggtgagacctcaggaagcttccactcctggtagaaggtgaaagggaatgggtgtgtgtagagatcacacggtaacagagcaagcaaggtgagagtgagaggttccaggctctatttaaaagccagctctcttgggaactagtagggtaggactcactcattgctgcaaggatggcaccaagccactcctaagggatccaactccatgactcagacacctccattaggcctcacccccaacactgagggtcaaattttggcattaggtttggcgggggacaaacatccaaaccatagcaccagttgtccagtaattcttaggaacagaaacacttttatgaccatgctgactagaacaaaattatctgtgattcgttatccattccagatgagaatggtatatataatttaaatctgaatttattcaaaatgactgttcttgtgttacaagtaaagatgatcatgaactgcactgtacaagaaattcttatctgatatctcaccgtgggattatgagaaagaagaaagaatcatcacaaacagctttaagaatgtggtgagcacaatggtgagcggcgaatgcagcacaaagcatatttagttagcagcacaggccaaaccgtgggtgacgtgagaatttagcacagaaatgcgctgggtggaaggtgggattgggaaggacctcttggaggcagaggtacttggagaggaagaccaggatctgggtgggcagagtattagagtatttaaggaggagtaaccctcagagtctaggtgtagggtggaatagggccatatctgtcaggaggggaaaacggaacagattggttaaggtgggtatctgggtctgtgagccaggggattcatcagggacgctttggtggccaggagcagaatcgcctgctaacatgctcatgtacaaagaagggttgtcatgaggccccagaccttctcccaaagccaatggcaggatgccttcatgggctcaggcttagaggcattggaagtctgtctcccaactcccttctgagccacactgtctcccttctccatttctccctcctctgcttgttctctccagagactggtctttccagagagctctgagtgtagcccttgctgcagctctgggccccagactgtctcatttgagttctgtctgtatcctcaggttctcaaggggcagagccttattggctcagcttggggaaatatcttcccagatccatttgcctgtggccaggaggcaggtcccagtgggtgaggggccctccaggggctctgaggggaggatgtgggtgcagcgctgggtggctcttgtgaaggagtggcaggaggttattgtgggtggaggacagttggtgaggctgcagagccagcctcaaacctctcagcaagcacacagagaaacgtgagccaagtttgtataaacatggggcattttatggagttgcatttttggatcttcagagcaggggttggccctggcagtaaggcctgccttgtgctgttaaatctttgctcccctgctttgtttgcctgccttcctctccctgtcttgtcagcaccctcgccataccctacctcaccaacccggcctgtctgtggctgggcagctcagaagcccaacttatccattcctaggatgtccctgcagacaggctgtaaaacaggcttggcctccacaggccgacttgcattttgccagtcactaccctggtcctcccctccatcctggtgccagtgcccttggctcctggggtactatggttggaatgtgttccccaaaaagcatgtgttggaaacttaatccccagtgccacaagttgggtgatggtgcctaatgggggtgtttaggtcacgaaggctccatgctccatcctcaggaatgccgattacagaagggcttgagactgggaattggatctcttgctctctgtctttgacctttcaccatgggagtatgcagcaaggaggcctttgcaaaatgccagcccctcaatcttggacttcccagactccagaactgtgagccaatacatttctgttcattataaagtacccagtctcaggtattctgttatagcagcagaaaatggactaaggcagcctgtgtccccgcctgacccttcaaactcactaaaggggagcaggctttggtgctcagttgtggccctgtgactccagagatacatatcctgtggctgtagggagctccttagtgcagctgctttgaggtttagctggaatcattcttggaaagaaagaggggttacatgggaggggagtcatggcttgaccagatgcctcttcttagaaggtccaccaccctgccaaatccagcaagcaaaatagttgagctgctgtgggataatttggcctgtcatcatggaagacaagatgagatagatgcactccccacctccccagttctgaatctcagctttgctcccagctagatacaaagtcttattgcattaaaaatttggtttttgttgtgatatctctttctgtgtagccaagagttagagagggctagggaaccagggacatctctagggtgaggatgaaagggggcagtgtcatctggagctctgggctggaagtctgaatggctcctcttatccttctcttataagaataaagaggaagatcatgccactgcactctagcctggtgacagagcgacagagcaagactgtgtctcaaataaataaataaataaataaataaagaggagattcccaataggaattctcattcctaatatgaatttcttaattccatagctattgatatgatagaattaataaacagctttcattttgccaaagcactaagtagattaattcattgacttctcaaagagagtctatgaggtattattaatttgtttattttacacatgtagaaattgaggcttcaagataagtgagctgtttgagatctcccatatagtaagtggtggagccagggtttgcatctggctttctgactatctagcatgtattcctaaccacagtattgtgctcttatccccaaggacatatttttgaatctagggaaaggacatttgatgacattgagctttggaaggccaaagcagacaacgtcacatcagaggaggcatcccctcctcctggagggcagcagagtttgaggtggtcttctggggctgggcggtgggtggcctcttgaccttctgtggggagagatgagttctgcccctattccccctcctccccaacaatttctcttctttcaccatcaggcagccactgaacctctgagaattaacatattaacattcctttggctatttccttgcacttcttccaggattccactggggacttggcagctactgccctcacatgggacagtgagggcagtgtctgtgggtggaggactaagtgtgtgatatttggtggtctctgtttctgcttttaagaattggccttgggaagttcctaagggttgaccacagcagtctccctttcagaagcaaggttctggggccttgatcttaaggaggaggtaagattcccagcattggcagccaagttggttactgtgataccaactgtggttactgtgaagggcttttggagggtcaggaaacccagtgggaatgtgctggtgtttgctgactcttccactggccactggagacagcagcagggctgctgctgagatgaggccagaggcaagctcatgtacttctgctggaggtgctgccatggagggacagcctcctccttagaggtgggagtgtcaggcacccccaggcacactgagtactaaagattggttgagctgtggtggctccttcagagtatgcccctttcatctaggtggatgagcacccctgcactatgggatggccatggctagtgagtggtcagagctgcccatgagtgaggagaggagggcatctcaaagggcaggacagggatagcccaggcacatacagggcccaggacagatgaggtatctatacctgcagaagaccaagtggaaggcatcctggcatttcaagtgggttggaacaaatgagccaatgggcagcccnnnnnnnnnnnnnnnnnnnngcgctctgcgttttagggtttccagtttttctgttctgttttttccccatctttgtggttttatctacttttggtctttgatgatggtgatgtacagatgggttttcggtgtagatgtcctttctggttgttagttttccttctaacagacaggaccctcagctgcaggtctgttggaataccctgccgtgtgaggtgtcagtgtgcctcccagttaggctgctcgggggtcaggggtcagggacccacttgaggaggcagtctgcccgttctcagatctccagctgcgtgctgggagaaccactgctctcttcaaagctgtcagacacttaagtctgcagaggttactgctgtctttttgtttgtctgtgccctgcccccagaggtggagcctacagaggcaggcaggcctccttgagctgtggtgggctccacccagttcgagcttcccggctgctttgtttacctaagcaagcctgggcaatggcgggcgcccctcccccagcctcgttgccgccttgcagtttgatctcagactgctgtgctagcaatcagcgagattccgtgggcgtaggaccctctgagccaggtgtgggatatagtctcgtggtgcgccgtttcttaagccggtctgaaaagcgcaatattcgggtgggagtgacccgattttccaggtgcgtccgtcacccctttctttgactcggaaagggaactccctggccccttgcgcttcccaggtgaggcaatgcctcgccctgcttcggctcgcgcacggtgcgcacacactggcctgcgcccactgtctggcactccctagtgagatgaacccggtacctcagatggaaatgcagaaatcacccgtcttctgcgtcgctcacgctgggagctgtagaccggagctgttcctattcggccatcttggctcctcctggggccttgatcttaaggaggaggtaagattcccagcattggcagccaagttggttactgtgataccaactgtggttactgtgaagggcttttggagggtcaggaaacccagtgggaatgtgctggtgtttgctgactcttccactggccgctggagacagcagcagggctgctgctgagatgaggccagaggcaagctcatgtacttctgctggaggtgctgccatggagggacagcctcctccttagaggtggaagtgtcaggcacccccaggcacactgagtactaaagattggttgagctgtggtggctccttcagagtatgcccctttcatctaggtggatgagcacccctgcgctatgggatggccatggctagtgagtggtcagagctgcccatgagtgaggagaggagggcatctcaaagggcaggacagggatagcccagggacatacagggcccaggacagatgaggtatctatacctgcagaagaccaagtggaaggcatcctggcattcaagtgggttggaacaaatgagccaatgggcagccccaaaggctgagagaaagtcatgggtaagagcctagcatggaaggaagaagaggtgtgagggagcagtgttgacaggggttggccatggcccatgggttgacactgtaccaacagatgcctttcccccaacctgtgtctcccagctgttgcctactgaccacagtagaactagtggacccctccccactccagagtctcagaaacaatgatgagcacttctttcaggctgggtgctatgctgattgctgggggcacaaccaggatgctgtttgtgggtggaaattggcaagtggacagcagctaccagatactgagtgctctttgccctcctctctcagctctcactgcagtctcatagacactaccctacctcattttgcagatgaggaaactgaagctcctggaggttaatgccatgtatatggtgacccagtgccgggggtctggggtgcaggtgagcccctttgtgtctcgtgcactgcaagcccagtggccccattctccatgtcaccaggaggcttctcagtcctggctgcttgagcctactcttcccacctgcatccagtgagttctggatactgagctggcatcggtcctcatggaaggcgagtgtgggcctgcccaagccatcctctggctccactgacttgctgggaagagaaactggcaccactgtttacattagtttctgtgcctgtgacacccagctgataccctctgttacgaagggacacccttccccatatgtgggagtaacagggcaccctcattggagaaccctgccagcccactggcacctgcagaggtttgtctgaggcagctgggcaccatggtgcagagcactggccaggcccactggggcaagagtttgtaaggtgttaagatgcatgattaacccagtggttcccaaacttgtccatacattagaaccactggggtggcttcaaaaaatgctgatgcctgtgtcccacccccagagattgtgatttaattggtttagggtatggcctatactctggattatttaaatgtccccatttgagaactgctgggttagtctatgagagaagtgtgggcaaaatgcccacttctgtcctcattgtctttctcagcacctactcctcaagggaaataactgattcaggctgcaggggacaaagcttccctgtgcctttgcccaggcacaaggcccctcctgggaggtgtgggtggctaaggctggcgtgattcctgatgtggcacgtgtggggcaggtatttctctacttgaggagtgacattgcatgccgtctgcatgctccctcattcctttctcacgacaatcttataggtagcacctttcaatctcctcttcagacgaggaaactgaagttcatggtgcatcctacgtgaggaacagaaagaggacagggaataaaactggattttccttgggattctcagatgggccaggtcctaagtaaacaccaatctagctctgctgaccactgggggcctttcttccttttgactctgttgtaaaagaaaattgaaaaacggtcttattgtgccttaaagcctttttaattaaatataactcatttaatttaaactactttaagttccatttttaatataagtgttatagtggtacaatgaaagtgccttctaatcaaagtgtgtatggggatttacctccctgtacaaaaagcctgtgggagcccaaaccaatgatttattcagacagcaatccaaaatcaccagaccctgagtgaggcacacatggtggaggttcatgagtgtgggtaggagtcggaagttcctctgggggctgtgcagattgaaggaggcgggtgtggagagggcttagcatggagcctggcgtgggtaattgcttagtaaatggaagctgctactgggatgctactgccatccctaggacctccgctgcttcccctgctagttcttactgctggtgccacagctacaaagtagggagatgacagtgaagagagaggctcccctggtgggcaggagggattgaacagtcctgagcagacaaacgtgctcagattgggtattgaagtagagacctactccagtgccagcccccaggaggggcacggcctgaccgcctgatgtcacacagcaaatcctttcccctgtggcagtctatcccccttccttgtttcattttgcaccgtggcacttcttagcatgaggtattctctacatttcctttgtttgtgtgtttgtttgttgcccgtttcttccagtgagatcctaagcttcataaggactggggctggggctgccttggcactgctacatctccaggacaataaatatctactgaatgagtgaacacatgaacaaacgaagggatgatgaaatgaattgctcaggaggcccgtcaagagctctgctgagagacctgggtgatggggctgagggtcttggggagggtcaaggaggtgggaattgcaagctaggacctgatgggaaggcatccacaaagctgagccacagaggctgtgagggatgggagtggaagtgaagaggggccagaggagatgctcaggaggacagagggaacactagctagcaggaagatccaaggggaggggacctattgctgtgtcagatgacagtttctggttggaagtcttggattaagggatcttcaagtgtccctttggagaagagggtgtgcctgaccttaagcactggccactttgggtgttttcagcttatcccaatcagacgccacttgcacccagtcctgcccccagccggccctttcccagcttgctcaccttctcagaggctccagcctgatcaatcaccgctggccccaccatgactctggcacattttgcatctttatgtcagaccgtctgtatctgtgactccctaattctgtgcaaaacaaagaatgaaaaatagactcagacatgaggactgtactggagggcacactttcttccttttttgtcttttaattttctaggcacaggttattctaaacctcatcttgggcttgcagttggcagaaagaaaagtagcagattggaatatcatgttaaacaggtggatgttaagttgtatcatttattggatggttcctggagggtgtaataaataatttaaacatgaactccttccccctttcctctcaagagccacttgtccttgctgtcctctctcctcccccagacacctacaagactgtcatgattttcttatggatcatggactgctggaatgaagtcagtgcaggaaagaagcttgttcgatcgacagctggtagacatgaagcgtctcagaatgaggaacgcatcacaggctgtccctgtgtttctgtagaaactttacctacaaaaggaaaaatagagcacgtcaggcttcagtgacagtcagtatgttccgtgagccagctgggaaactgcactcacctccatattcttaccaggagatcttgggataatctgatttcattctagcaatagaatgtgtttagggcctacgctacgccaggcgctgtgctgcagtaagacatgaaggagacgtggaccctgggggagatggacacccctcttgtagttaaagtccagtatgaccattgcttttggggttaagcagctctgcagataatgcctgtgttaggctgagccctgctagtgtcagtggaaatagcaatgacatgttaatgaggttgttcctcagggtgctgagttagagccccatgctgctaactgttgtgatggtcttggacgtggtgattgctcattctgagagatgtggattactttccaaatcaaaaagttaattagtttttaatttgttgggttgtctgagagatacaactggaaaattcccctcttgccttcttggtcccttaatctggctgtgtgcaggcgattatgtttaacaaggagcagtgatcaatcagttattgacatttatttcatcaaatgtaactgaatgtttactcatattggtggatttgctaccaaagactgtcttaaattcagggctaacttttctttttaaattgtaaatgaataacctttagcataaagctttaaatgatatctagaatttaaaatcactaaatcctcatataatatttccaaatcatcttaatttctgaagatgggcacctatccttttgctttcttttctgtctagtgtctggtaatcaccattaattccatttctttttagagtatcacagctttctccttcactgaccaccctttgcttcctgtcagaaagccctggacagaactctctgtgggactctgcccatgtttctgagatatcgcctcaattgtcctggctgggctgtcgggtctgcccgttttacagatgggcaaactggagtgggaagtatccgggtggcttcctcaggcctgcagctggtggagcagctactgaaacaatcaggtgattcagatctactggaggctttgccctcatgggcataataaagttggtattcccaggtctgcccacaagaagctattgatgggtttatcatgttgattcttttttaaattagtaaagtaaaagagtaccttaatagtaaagacatttccttggtatttttaaaaagtcatgtgacatgatctcttccttttgtcttgataaacctccctttaaactctctggcttagttattttagacttcccagcctcatgtaatactggtttccttacattgatccatttattgtcatttattgtaagataggcaatagaggggacatcgagcttgcttgctgtgctatctctgtttcagccccaaagtgctggagacttgcactgttttgtttgtttgtttgtttgttttgagacagagtcttacgctatcacccaggttggagtgcagtggcgctccattgcagcctctacctccctgggctcaggtgatcctcccacctcagcctcacaagtatctgggactacaggtaggcaccaccatgcccagctaattttcatatttttttgtagagaggggggtttcactatgttgcccaggctggtctcgaactcgtgggctcaaaggagacttgcacattctttgcctatatggccatgcccagccctctccccttcacatctggtcttctgggaagatgagaaaggcaagctcagcctctgctgattgggcaactcctaggcagggctggctgaaaggtgcagggacccctggcctttatcaaactccctcagctatctaagcccctaaaggtttagtgttggcagctgtgcctcccccacctttgactgttctttaaggcagtaagcccatctaccagggctacacacacctctctctaaccccagagccatctgacactgttctctgtggtgcaggaggggaacactgacccctcgattaagtggcatttctcaagagccagcaccccttcggtgtttttcatgagcacttgcagcaagctctgcataactggaggaagcagggggtgtttagaccctcccccagaatatcctgttctttgctggattattcagcttggctttcaaactagccccgggtttagggttaattctctcaccttctctggctttgaagacccagacatggtgtgctgagaaatccaacaactcaatagttttccttctgcctttaactcagccatataaatgagataaagtgtgcaaaactcttactgtgtgcacagtaagtgggagccagcagtggaatacatgctacataaggcgccactttatttagctgtattttgtcagtccaagtgaagattttaattgcagaatagtgtcttgctagcaaaaatgaacctgcttagagtcaagtttttaaaattcaagtgaataaatgaaaaattgtaagaaagattgttaaagaagcattcattttaagaacatctcagatatgaaaaacttagaacttagatgtcagaatttcagtagcgatgaatcccatggcaaagcttccatctcatctgtactaattggttcataaattggacacgtgggcttccttttgtgtgtcttcaggaagttgaggcctgaggaactctgaagccaggagcttcctcagcccctctgctgctggatggaggtgctgccagtcaggggcccatcttcaggacactggcacagggacctcctcaggccgggccccttgtacagcggactcctttctgctttgtctatgaagatctggccacgttgagctccactccattctgctttgtctacgaagatctggtcacatggagctccactccatttactttttcgttgcattctcttctcagtgtggttgcttttgatcccccactttcgtaacccacatagccaatattttcccagtgaatcccataatattctgggtgacagactgaggcttactccctaaccaaagacctctgagagcacagatggagaggcgtgactatgatctggggcagggcctcaccatccttttccagagcctcaccccctgtgcccaagatggacatgggatggacctaggggtagaatttgagagtgctcatttatactctttcagcagccttcaaactgttttttggtagctgagaatctgtaatcggcttttggattatgaaaaatattgctcagcactcatattatattgattcaaaaataaggattgtgtagtttaactgcatagtaaaatacagctttatagaatggtaattttttatttaagttcttctacattatagtgagagataacggattcaggaagggcacaatgaggaataaagctgttgtattgtattggttaaatgacattttaaatgatttggctgtcaaactcgtagaaaggttatgagcagtgaatgaaaaatctaaaattaattccctgcttcaagaaagtgtgatttatactataataaaattagatttttagttaaagaaatttagtcattaagtaatgcccatgcactaagtctcatttataaccatctggtttgaagcttctgcagaaaataatttcttccttagacaatgcatccagggccttggtgtcattatgtcaatgaatttcactccttacatttctgctacagcttttgaggggttgcttttttaagcactggaaagatggattcttatttagcctcaataattgaggaagccgttgaactcatttacctcccaaaaataatctgatcgtctccctctcttagctcttttcatgaatggtaatgttgttgatgatggtggcacatgttggaggactgcctgtgtgctggacaccatgctaagcatgggacaagcttattattatttcatttgatcatcacaactactctatgtggaatgtgctatttctgcctttacagatcaacaaacagagactaaggaaatgttaaataattcaacaaaggtgacagaggcacagctggcccccactcttaatccctgtcatatttttcacgaatgtgtgttgagcatttccttggaggaagtagagtatagtggtaggacctcagaggtttgagtctagtcctgatgtggccacttctcatgtgaaattcagcaagttgcagtctttccctcagtacatctttcttcatctgtaaattaaaagtggggtttgttccctctatttaacaaacttctgattactcctgggtaatttgtcttattttaaaaatttttactggagcatatcaaatatatagtaaagacacatattctgagtgtagcacttggttaatattttgtaagtgaacatatctatgtgaccaccaccaagatgataatatagaacatttccagcatcccacaaaccattctgtgtcccccggtcattatcctcgcaaaggttactactcatctgtcatcagagattggttttgcttgtttctgagatttataaaaataaaatcttataaactgtactatttgtttctgctttctttccctcagcgctatgacaatgagattcagctacattatcacatgttgcagagttttttcttttgcactgcagtgaagttttccattgtatggatatgccacagtttatctgttccaccattggtggacatttgcattacatatcatgctgcattcagccttcttatacatgcattttggtgctcacatgaatgtacttctgttggacatttacttaggagttaaattgttgggtcaggaacatagatgtcacaatagttattttaacataatttaattacaggaaattggttaaacagatattaaaggattaagaaggtggaaaaggaaacactgcaatagttaagagcagtacctgcaggaaggaatacctttatcactactgtctccaggggaggagcctctccatactgggactcagaccaatgaggaaagttttgctggtgctggttcctctgagggtataaaaattatagttccttcatatccttgtaaacatttactattaacagttttttaatgtcatctattatatgtggtttatagcagtatcccactgtggtttcaacttgtgaagtgcctattcaaatgttttactcattcttcaattaggttatttgtatttttcttattgatttgcaaaagtattttatatattctcaataagtcattcgtaagatatatggattgcaaatatatttccttaatggcttcccttttcattgtcttgatcctatcttttaataaacagaagtcctaattttaataaagtctgagatattcttttggtttgcttttcacatcctctttaagaaattttcacctatgtatttaaagtcatgaagatactcttgatatcttatagagacttagttgcattacttttcacatgtagttctacaatccatcaggaaatgatttttatgtatgttctaagatacgtccaacattttttccatgaggttgccatgatgtgtttaaacttgcttatggctcagcatacggccaatttttataaatctcgaatggacacttgaaatgaagtgctatttggtacagtgtttgatgtctgtcaattaggtcaagttttaaaattatagtgttcaactcttctatatccttactgatgcttttttcctctacttgttctatcagttaaagacagagattttttaaattttccaaccattattgtgggttaaaaaaattctcctcttagttctttgagttctggctttgcatatatttagactatgctactaggtatgtacaagtttagaattgctatatatttctgttaagttgttccttttctaattatgaaccatccctttttatcactgataataattcttgcctactttatctatagccatgttttcttggttgaagttaatatggtttatcatttaaattctttacattcagcctttttgtaaacatatatttatgatatgtctcttgtaggcagcatatagttggatattgttttctctattatgccaatccttgtgtgttttattttttatttattttttttgttttgttttgtttttgttttttttgagacagagccttactctgtctcccaggctggagtgcagtggcgcaatctgggcttactacaagctctgcctcccgggttcacgccattcttctgcctcagcctcccaagtagctaggactgcaggtgcccaccaccatgcctgtctaattttttgtatttttagtagagatagggttacactgtgttagccaggatggtctcgatctcctgacctcgtgatccacctgcctcagcctcccaaagtgctgggattacatgcatgagtcacctcgcccagcccaatccttgtgttttaatgggattattcagccaatttatagttaaataggtttaaatataaacccatgttttctctgttctatattccttttctcttctgcctttcatgtcttcttttggatgagacagttttggttacttcattcctttggtgtcatagcactaattttgccatttttgggacagtactaggacattataacactttaatctcatttgacctcctgatcttttttaaaaaaatcatattactatgtattttagttctacaaatatttttatcttacagtgcattattgttgtgttaagtagccgaaatgtatttttatggtttttttaatgctttttggtgctcattatttcttcttgcatagctatacattcatctgaataattttctgcgtttttgccttaaaagttcgctataaagtattgctcttagtgttaatttgttggcaatgtattctctcagggtttttttgtctaaatatctgtattttaccttcatttattttaccttatgaatacccatattttcattggattctaatgtttttttcaaattttaaagatggtgggtactatgcttattacctgggtgagctttacaccaaatccccaagacatgcagtttacctgtatagcaaatgtgcacatatacccctgaacttcaaataaaagttaaaaaaattaaaaactaaagatggcattccattgtcttctggttccattatttcctactgaaaaatcagctatcccacttactgttgctcccttataggcaatgttctccccatctctaccacccaccctttggctgttttaaagattttctatttgtctttgaatattcaactattttactgagtacttaggtatggttgtgtttgtatttatcttgcttggggcttgtggagattcccaaatttctggcttgatgtctttcattagttttggaaaagtatcaacaagcgtctctttcagtattgattctgcccattttctctgaattttcactctgaaaatttaattacatgcttgttagaactcttcatgatgttacagtgtctcatactttttctgtatttttcattctttatcttttttcctttcagatcttctgtgtggttaatttttactgatctagcttccatcttactattcctttcttcagttgtgtttaatctgttgttaaatccacctattgaatttttcagttatttcattttcagttatgaaatttttgtttgattattttttgtttatttttgtttcaataggtttttggagaacaggtggtgtttggttacaggtttttagtggtgatttcggagattttggtgcatccatcacctgagcattttacagtgtacccaatgtgtagtcttttattcgattctagttttataatgaaattcagcatcttttctcctattttcctaaacatattagccatagttattctaaagcttgtgcctaagaattctaagatctggataacatgtggctctgtttctgtggtctgttttcttggattttagccattcgatcccatttcgtgctatgcctggtaattttagactggatgctggagattatatatgaaaaattgtaaagcctgtggatcactttatagatttccacagaggatttatttttccttgttagacagatagagtcctggaatatcatctttatctactcaagaataggaataatttgagaatatatggtcttagcagtaagtctgctgcatttgtcagggcgactatttcttggaaagcctaatttttgtctctttagtaccatgtactttcaaaatctatacttagattttattatttgaggcttttttttttcttgttcaaggctactttttaacttgtttctcagccttttgccctttatgtgtgtagctcaggcataatcatataactcaaggggaagccgaaaatgttgagctcacttctttctggtttccttttccagggtttctgaccctcaatttctggcttctttggtagccttgcactctgatgtttatttcccatctcagagagacttctctaagttctagaatattatattctgtttggcttctatgcaaaacagcaaatgtcgcaaaggggaaatgtggcagtgaatatggggctcatctcaatggacttttctctcataactttcctttaaattctggctgcttttgttgctgttggatgccttcaaaaacttttttttaattccacttttataattgttgatagcagaaggattagtctcatacaagctacttttttatggcacaaagaagaagtttatctcataaaattttcacaatgtccctaggaattaactatcatgactatttttaaagttggaatgctgtgtgcataggcattggaatcagactttgggatttaaatcttagctggccaccgaccaaaatatgagaccttggacaagtttaacctctcctccctttcagtcagtctctgagaaatgaagtggaagaactgggaggctaaggcaggagaatcacttgaacctgggaggcagaggttgcagtgagtcgagatcgtgccactgcactccagccggggccacagtgtgagactctgtctcaagaataaaaaaattttaaaataagataatcctatttttatttaaattatttcagagtataataaaaggaaaacttccaaattcattacataaagttggtttcattttaatttcttgttttttgttttttttttgagacggagtctcgctgtctcccaggctggagtgcagtggcgcgatctcggctcactgcaagctccacctcccgggttcagtccattctccagcctcagactcccgagtagctgggactacaggcgcccaccaccacgcccggctaattttttgtatttttagtagagatggggtttcaccgtgttagccaggatggtctcaatctcctgacctcatgatccgcccgcctcagcctcccaaagtgctgggattacaggtgagagccaccgcgcccgggcaatttctaaatctgataagaaaaatatgagattggtagaccaatctcatttatgaatatcagtacaaaaaattatagaccaataaatgtaaaacatatttaaaataataaacagaatccagcagcatatttttaaaagtatattatgactaagaaaagcttgttttagaaatacaggggtagtggaatattatgagatctactatgtaagtcatcctattaatagaactaaggagaaaaatcatatgattatctccttaaatgccagagaaaagtacttgataaaatccaacacatttattttattttattttttattcaacaaatatgtattgagcatctgttctgctacagcactgatgatgcaagagtgaaaaagatactggcgccatcccaacccacattccactagagggaaacagtcaataaacaaatgagtaaaggaacaagctgtttttcaactagcacatacatttatttttaaaactcagtaaaatgtatattggtttcattaatataataaacatatctcaggctaaaagccagcctgtcacttaatggggaaatgctaaaggttttcttctgaaagcaaaagccaagacaagggtgcccagtatgaacacaacgcctaacatgggttgagaattggttaaagctctaaggcaagagaaaacacctggaagtataggaattggaaagaagagataagataattgctgtttgcaaattacataaatactcaaatggaaaccccaaaagaatcaatggaaaaactattacaaacagtaaaatttaaccaagaagctggttataaaataaatataaaaaatatttttaaattgccatcaaatatacaaacaaaaatcagctggaagaaataataagagaacatcccatttatgataacaaaagacatacaaaaaagaaatattcaaaatacgcacaaggaaaactataaaatactcttgaaagaagcaaaagtagactcaaacaattattaaaatcctgtgttattagataagaacatgcaacattatatagatgtcagctttccctaaattaatttataaattttatgtaaccacaacaaaaatttcatagtttttttctggagctgattatgaatatctcctgttccatgaatactagttgtttcaagaaacagaggtgccaggccttggagcaggttactgaggaacagtttgggaggagctgggtttgttttgtgcaaaatacgctctgtggcttatgtttcctgcatttaacctgtcatctctatgccgcctcctctgaacccttacctgatgagtactccttcaggaaccagagtttggtttgtgtgatgggctgttggcatgtgacatggatcttccactgatctccaccagggctttttgctcagtagaaaggtagcagtcagggaatgtaatttgggtaggacaaccttcccagtgccctcttagtttcatctctaatattgcctcccccttctgacaagaggatgctagacaagaatgctaaggtgtgaaagacaatgctattaccttaaaaagcactgttgctgaattaccttcttggctgcggtgttgaggtggtagtcccagtttggtgttttctcttctcttctttagttgctagtatggactttcagcttatttttaaccttaggctttttatccaaaacatgtcgtttatgatgaattggagatactttatattagttatgaaactgcaatatgcatttctagtctttccccccattagttctcaccaggacttttcattcttctagagctaccctgaattttcataccacccaacattttcctatgctattctctcttcctggtccaccctccctcccccatttttgtctgaaaatctgcctgttcttcagtgctattttcaaaggttcttttaaaaacacttttccttatgtttccaactggaatgtgaaatgctggtatttacaagacaaatcaccctttcatttctcagtaatttgtgtttgttctgtggccccctaatcaactgtgaatatcaatgcaggtactcagttttacctgggtaacttctgaaacactttgcttattgccctgcgcatagtaagcatcaataaagataggattgaattaagaaaacccaagggcttaatttagtccagtggcatgaactggctatccaaattgttcataggatctcaccctttggaaactataaattgtgtttaatctattatcaggtgatgtcagtgacatatccagtagcagtggtggtcttcaccatagcaccacaaaacagaacctgctgctggccagataattttagcccatctgcttatgttttcttcagtccctaaaagcacctacagttcaggcagagggtgggtcatcaacctggaagagggtcttccttaacacttggtaccagcccatactccaaataaggaaggccctgagaatgagctgtgctcattaaaaactttgtgattaacaggattttttttgcctaagccctcaaagcaacaagttgtttacatttatagatgtacatgttgagagtttagtagaccaacattgctcagtgtcatgttcttcgtagattgttcaccttttcataaatgtgtgactaacaagagaggagatatttgcaagtatctgtacatatgaattattcttcagaaaacacaaagtctttcttttcttgcaggagcccagaagctttgaagtcacaagaagagaaggtaggaaaaatgcactcatacccattttattttcagtgttgacatttttgaagtagtttgctgaaactaagatgaacttcagactgtgggcagctcattctttgaaatttcatgcggccttttctgggtgctgactgcttagcacttgtctgtagggactgcatggactgaaggccaggtttgcttgtgaaaactatgacttctaccttcaagtaccagaggtgggatacttgaagaactggctcattcgcaatcatgtttttggtctcttaagagaagcctcattcttgagtgaagtttggaataattattagttttacccagcaaagcaacgtgaacaacacaaaaaatggcctatggtttgtggtatttcaatatctgggaagagatgccactgtgaaaaatatttctgaatagatttcttacagcttcagctaagctgaaatagaaataactaattaattttccttttgaaaacagttccatgatgttctgtttcccctgccagagttcctgtagcacatttgttttatggtctctgaggtaaacatatatgggtgttactttcagaaatcttttagtggaaattgaagtttcccttattcattttcagtaatacctagtctctaataagggatgccttttgtatgatttgtggaatcattaacaatcatctttttattacatggatagaatgatgagatcagaaacgaaaatgagttcctggtctagaatgtggctttggttttacccttcaccacatccttctctgtggtactgtctccaaagagggagacaatctaaaagaaattagcaaattctatattgactactaaatctaacattgctttgcctcctgattagttcttgtgttatgcaacacagcaaaagacatagaatggctatgttatcaacatgctttgatacatggatattcatgcctgggaccttggtaacacaaacttttcacactatattgagtccagctggtagtgtgctgctgtccatggtgctggatccctagggtcataggatctggataatctgactctaagatgaactttctggcttacattcccatttgccattatcttcggcttcggactcgatgtcctctgaactataggacaatatgtaaagcaaactgcattgtttgaatatcaaaaccaaatggatgaaggttgatggagctgggaaggaggtttcttatggaaagtagtgttcacaatgggtactgtgaccatgtaagttggaaagaaatagccataaggagaggagaatttgacatgaactttggctttgaataatattctgtttatgccagaatcccgactgtgaatgtttggaattgatttgcattgtaaaatcacatataaacttaacctttttggaatcttactgtccttgtgttgaaaatgtctctaataaggctggggttataaaagagccatgtatttctattcaaatgcatgaaaaaggtctgagtgaacttatgacttcaaactcccagaagaatgagagtgtccagaggaggagtgaaggtgtagtcaggctgcactccattcatctgtaacctctccaccgctggaagtgtcagccttcgcaaatggttgacttaggaacatacactgtgggtttgtactagcaaatttgttctaacatcacagaaacttttttcttcctattgtgcactgatgtctttcttgcttgtttctgtcaaagttgaatgtttgagagttcctgaaatagcccagtgctgtaacgtcaatgcttacaacctggcaggaagaaaaggagtgggaccttgccggctggttctaagtatttttaggtctgggaattcactgactcactgacttgggttgtggggttgttaatcttctccagaacagtgtacaagtataaaaagaatagaagcactatggtgcttcagtaaactatttttctgtcaaagaaaagtaagatattgtctagcaatgaacacctgggttggttcccagctctgactcgaccccggactgaaagaggaacagatgagtaatagctgatttttctgcacagcttacaaggcccaggagagtctagaaagtcttcaggtctagagaggaagctcccagtcacagaacctgaggaggtttcctgttttggtttgccttatttcaatactgtacctgactcaggagcatcccctccattgaaggtttagggccacaaatggctaaccaactgcaacttcacattatgtgacttttggaaactcttgactaagtatgtgtgttgagaagtgagaggggctaatgttagcagtggaaatcgagtccaagccaaatcatagtgggaactagcgacagtaggggcaaagtgaatgcattgtgtgccttaaacctgtcctctgccctatttccccctcttcccctccagccgtagatgtcatgcagtctagctttcttgcctctggccttagactattcctgcatgccttgtccctcatccttgtcaaatccacctccccttcatcctttccaactctctttcttgaagtgtttagcttaccctatctaattggagagggaagggctcctatcaggttaatttcctgagatcagagaccctcctgccttcttcatccccacattcctcacagctctagcccagggccagtagttaatcaacaattgtttcttaaagtaagtgcaagctacacatttgctttgtgggtgttgccttttcattctggcccttcccagtaatatacaagtgaggcactgggccctttggttctggaaaggcacctttaaagaaatgttctatggctatcattagattttcctggctgatgcactgaagaaaattcaagtaagcttagtattatgggttgaattttgttccccaaaaagacatgtcaaagtcctaaaccagaacctgtgaatggaaccttatttggaaatagggttttggcagatataaagatgaagtcataatggattagggtgggccctaatccaatagtgaggtccttacaagaaaagggagaattggacacagacacacaaggagaacatcgtgtgatgatggaagcagagaattgctggcaaacaccatgagctggcaagttgcaagggaccctccatccctagaaccttcagagagagcatagccctgccagccccttaattttgtactcccagcctccagaactgggagaaaatccatttctctggttttaagtcacttagtttgtggtttattatggtggccctaggacagtaatacacttggaaaatgttggactcagtaaactttagttttcattgttgttgatgatgatgatattttgactggagaatctctcatgatttttcatagacaaaatgtcactctcaacagggaatgtaatatgcagcattttccaaacttggttttctgtgggatttaacaaaattaattgtgttgtttttaaccatctcagggcaggcattccatgcagtgccttttgcaaaccctgccctagagagcccaggaagaggcagagcttcctcagagtgcccaggcaccagactgtgctccatgggctgtgcatgtacagaacagtgtgacagcaataataagaatatcttcttggttgttctgatgttttcagagaatgttcacgttctttacctccctttcccttgagtaacctgtgacacagagcagatagcactgcacacatgagactccttccttttcatgttaatttttagtagggatgaggaatgcttctgggctggtgcctctctgatgccctgaacctctctttagtgggtggtggttgcttaagtgacttgatcttgcttcatcacatccaagggtgtttgtaccttatgttggctgccaagcccagagagctgagagggacttgctgggggtgctttgtttccaagttagatttgtgggacttgaaggtagacacagtagcaaagattgtggcaggactacgagactgatagggtgtcctctgggaagggtgcatgcctccccaagggagacagagccattcctccttcaggacagttccgtatgaccctggatattcatgcctgggacctccctatatgagctgcatgggaaagagtgatggctgcatctctctgtgctttccagtgcaggtatttttataactccctccagacatctaaaatttaatttcacccttttctgaagcttcagcaaaaggtgccacccttacctttctaagatactcccgtgtccactgtgagggccaatgctgattgcgactgccaaaattcatctactcaaaccggtacttttctctgactgttcccatcatgttgaattacagccatgagcgaacacttgagtaagctgagcaaatggctgggataattcagcccttgtcagccatctctgaggagcatagggcgatctgtaagctattccagatgtccgtgattgtgctgtgattaggggctgcgagtttggggatgagcaccaatgtcatgttgcattgcccacctcccagcgctggctcccgcacatgttccagccctgtccagcctggcctggcttctagcaaggctgtgagggaacccgggagaggagggctgctgctgtcttcagggaaaaggaaaaaagggggtgaccatcacatgcacactcagcatggctctggctcctttgcagtgcagatctcctaagcaaacatgacctgccagtcccgagtgtgaaactagagcctcactttctgaaaacccgtggaatcggtccctaattggcagctgcctccaatagcccctttatagttctctgcatctgggtgaacttcagctatcaagaactgcattctgtttaccattaattttgattttgtgtagcagatgttttctggatctctcagttccctgcctaatctatcttggtataatgtgaagtggctgactgtcttcaatgaaacagattaataaactcctaggttattttggggtaacttctttaatagctgcagatgtagggaatttaaaagggagccatccagatttgacagtgcctggagccgtgggtctttttcaattcaagactgccatctggggaaagagatggcttttccttcccccatgccaccctctctcacatgcagtgaggcactgagtgttcttctacagtcactgggctcaaagaagttgagagtgacatctatctcctgtctcccaacctcacagaaattggctctttctgggttgcgttgccttgtttcagctgctgggaaactatattgtgcttagttgcctgaagttgaatgggaagtgcatggtgcacctagccgatgtgtcctgcttaagtagtgatttggtgcccagttttgatcatgaccaattggtaggcagcttactcacagtgtgacttcaggtaagttactcaaccttacctgaaaaaggatgcggatagtaatagtacaaaccatcagtcccaattctgagttgtagaaacccaacttgtgctggctgaagcctgaaaggcctatgaagctgcagaatctaagggtggatctggcttcaagaacagctgataaaaggattctcacactcatcctgtccttccttctcctggcacattggcctcttccaggtagccttccaggatggccacaagcagctgcagctcagagtcctgcctgctcaccgtctcagagggtgaaacttttcccccagaatgacaccagaaaaatcccctcagggtttgcaaaatcatcctcatccagaccacaggcaatggtttggtcctcaaaggaagattctgtgcagggatgtgttcggtgtccacacagcctcgtggacatattgggaggggtgactgtgtgtgcagacgccttggcacaggacaggcaatgttggcagtgctcagtgcatgggtaatttttactagagctcttacaggcctggccatagacatagaggcctttctcaagtaagccagttcattcttctgtctccaagatgtgttcatgagactctggatgttgtggcctattgacttttccatgaagaattattattattattattattattattattattattattattattattattttgagtccgagtgtcactcagtcacccaggctggagtgcagtggtgcgatctcggctcactgcaagctcagcctcacgggttcacgccattctcctgcctcagcctcccgagtagctgggactacatgtgcccaccaccatgcccggctaaagtttttgtatttttttagtagagacagggtttcactgtgttagccaggatggtctctatctcctgacctcgtgatctgcccgcctcagcctcccaaagtgctgggattacaggtgtgagccaccactcctggccgaagaattatcttaaacttagcctattctggtccctttcctctgtcagagtctttctttaactttatgctctaattctctctttctacaatcagaagaactaagcctttaagatggtgcctttaagaacttaaagacaaacgaccgggcacggtggctcacgcctgtaatcccagcactttgggaggccgaggtggccagattgcaaggttaggagttcaagaccaacctggccagcatggtgaaaaccccgtctctactaaaaatacaaaaaattagccaagcatgttggtgcatgcctgtagtcccagctactcaggaggcaggagaatcacttgaacccaggaggcagaggttgcagtgagccgagatcacaccactgcactccaacctgggagatagagtgagacttaaagacaaacataaacttctctcccaagatcaggggctttctgagcactggtgtcagaaatcatccttaagcattacagatataaaccatcccatcctctggctgagctcagctctctccagggattggaggcagcaggaccttgtggtggatagctcagggctcacgatggatctgccagtgatgctatccgaacctgaggtatgtaaatcctccccaagagccacagcgccactcacctggtacctgtagcctttgccctgggacagctctcatgctgctgtgcaggcacaagttttggaaacgcaggggtcagatgtctgcctcccagggtcccctgtccctgacacagagtgggcactgaaaaagtgttagatgcctggcatgtcccagggctgacttggctttatgtcatctctccgtttctcacaaaggtcagatcacagatacagggccttccaggttgtttgactgtgaaccccatagctccaggatacctggtcctatttgctgagcttgctcttcccaccagtccctgggaatgctcactttccttaactaccatcctcagagagctcctctgccctttctaacaacttgtgggtccctctgctagaaggagcttaaactgtgttcatgcacatgagctaaacctctgtggttatgacgggcaagctataggtcggtgtgggcaggataatgaacccctaatcactcgtgcttgcctagcggtctccttagaggttgcattgcaatatttgggcataggtcactatctggaatttgtggggaagagtcacattgtcgaagaggtcatgacccctaaagggtatgaaccactgcacattcctaaggaccaaaagacaggatggtgtcagccagcctgaagcacgctgatcctgcccctccaggacaagtggagagagatgatggtgctccctgtatacctgctgaggtccccaccctacccaggagactcaccctcatctctcagatcccagcagaagttaagcttgacatttgtcatcttcgttacttgaccagtccccaagccagaggcatttctttgcttttcaggaacccttgaaattatcttcttcatataaacactgaagcccttttcaaacctcattaagctatttgccccagcatattaatgtgctatccaccagcctctggggttaattatctgtgagttaaaatcatttgtttctgtctcttttatctcattgctgcttggcaatctttctttattaggaaacgaagtacaggatgcaactgaccattatgttctaattctattcttttcatcaaaatgagttcatcttttaaagctcttttgtaaaaaacaacaaacctgtcttttcattattttaagattgtgttgtttttttaacaaatctttaatctctctgcttcagccggagcagagccaggactggaaataatctgtaaggggagacctctcctctaaatcagcaagacctgccaacactctctctcctgattggcctcactcactctgcatttggcccatttctctcctgtggctgtggtgagggcttccaaggtgtacaagttgggcttggtgaataagccacagtgtcttggcagatcaggcaaccagggttggaaaatcctgtgcattctaacgcaccccactggtctctacatgctcttatttgggttatatttcttggccaaggttgccattgggttccaagaaatgcgtcagggcctgcattaaaaagaaaaaaaaaaacaaaaaccttttcacaaaatgttgaatgttgctttgaactctccaggaagtcagggagcgtgtgtcccagaaatgagcaggtaggatgggcactggctccatggagacagtgacccacagccttccgggataagagtgcagccaatagtggggagacctgggccggggtctgagcgcagtcagtgcagttggatggtgcacagagctggttctcccatgtactgcaagccagtgattgcccctaccctgttcttcggggctccagcttctcagctccattctctgcccctcaatggctctctcacctcatcagtgcctcaaaaacaatatctgggactctagtttgataactactacttgcattggagaaatgactcctctggaaaggtgaatacgattctcagagtttgttgaggttttattggttgcttatagaagtttccttgggctgattggagtttggtgtgcagagatgacccggcatagtccctgcccttatagatgagtcagttgagaagatgcccaagcgtcctgcagacagatgtctacctggtgtacctgcaccatggccagccacctctcagttgggtccgcaacatagagagagcatttgttcagtgtaattgatgttggaatctgggagaacaactctctgaatgttctggtggaggtgaagtttcaggatcttttttccaaagcatggctgtctcagcagagggtcccctttgacttttaagggcacactgtaccagtggtgacgtttttgttgcaaataacaaaccccaacccaactagctcaaacaaaaagaggacttatggcttatgtaattggatagtccagtgagggtggaaggtgaggagtgctgggcttcagatatacttgatatggagtgtaaggacctggcttctccctccattttgcccctctctgggggttccccttcatggtgagtgccagcctcccctcctcacagctccaggtccagtggaagacagatggcctctagtccagtgtatcccacaaaagtgctaaagctcactgggattggacagactcaggtcatgtgattcatgcacttaattaatgctgtgtgctgttgggtttcctgaagtcaccagccataccgctggtcaggatatcatgaagtgagagtgggaggaaggtggatccccaaatggcaattgggtctgaataagggacacagaagcaggaaggtaaaaggaaattctctaagcatattaacgtctacttaatgatttcacatctgggtgtctctcactctccacccctaaaaggattctgagtgcctgaaaagcaggctaagaatcagcaaacattcacctagcgtttcaggggggaggtgctctcttctgtcttcagaaggaatccaaggctaagagattaagcagttgacccaaggtcacagaagcttctaacagagtgtgagtttgaactcaagtccctgatgacaaataaagggcacttttttgttgtttcaaatcacagctgcctccagcgattgggttctttcaccttgttcttttgccctgtcccctagggtagctgcaggaggtacctggggaggtgcatcaagcattcaccagccgaaacttgagaggggttttaccccaaacatgacatcctttctttagcactttagccaaagcacataaggatgaaaagcaaatgaacatcaaatgatgaaatcacccaaaatagagagaaaagtgaatgagcaagcccctcacctggcagtggcttcagtcctttccttgatgatgtttgtcagaagcttttattttccacttttcctaagagatcaccttctttcttgggaaggggttggtggaggctcgctgggctggctgcttctaaatgggcatggggtggcagacaggaacacaggatgggggatggacctcacctataaccagggctgctgttcaggagccctgaactttttgcaacctctgcctcctgggttcaagcgattctctttcctcagcctccagagtaactgagattacaggcatgcaccaccacgcccagataatttttgtattttttggtagagacggggtttcaccaagttggccaggctggtctcgaactcctgacctctggtgatccacctgcctcagcctcccaaagtgttgggattacaggtatgagccaccgcaccccgccaggagccactttttagtaagtaatttcctatgtgtccacacattcaagacaatttagaggcaaaagttttagtcctttactataaattctgtagattggaaatggaaacattttcacattcaacttcttatttaatcttcataaacaacctctgagataggcattgcaatcttattttgtaaatttaaaaaatgaggaccttttgtactctgtaggaaattgatcaaagaattaaaatgggcttcactgaggtcattcaggaagatacattctgtgggaatctgataatgtttgtgtaattctgattgaaatattcgtattcaaaaatgtggattcattgttctacagtcagcatgcctgcagagtcagaggtcctgggacctcccccaacctcccatctcggggagctgtgtcttgctgctgctaccaaaggggagtagagaaccccaacttcagaagaaataggcctgtaaaaaacccacgggtctgggcaatgcgttgtggggggtaaaaatatatttcagtctattcgctttactaattttagcagttatttgctctccctttttgctggaagcaacattcccatccagctgcttggctgcttcatttgaatttttatcatttgtgtgagcccctgcatgtttggacacaaaatgggagtcctgtggctcagaggggacgttgatttgatagggtcagatctaatctcctgctcagaaacttcagcggaaaataaaatgagttgaggtttctgttttgtgtgtgtgtgtttattttttaaaaacagtaggcctgtaaagctgtgctggcatattacttttttcccctttatacggaatttaaaataataccttacattcaaatagtgtaaccggtgtgccttttgctctcaaagagctttcccatttgtcctctcatttaatatgctcaagaaagcctgtgagttgggaagagtgaagatatggtcattggtatttgacagaggaggagactgatactcagagatggcaagggacttgccccgggtcacacagctaattgaggcagagttggagattatagcgtccagttctgtattactcccaccaaggcttcctctgaaaataagagtttatggcagaagttttcaaattaagacccaatgggaaaacacagaattttcagtcctgttttggttcttttaaaaataaattattgtaaagatgacttctctcatctgtcaatgtaatgatcccatacctggggtattcaaaatattcaaaatgtgtatggaggaaatggtaaaagttaatcattttcacagtacctgtctgtggtgaggtttaattatcacttgacatatttcatggtttaaaatgatgacagtttaaaatagagccagagagagccagaaaaatccattcattatcatgtgtcaggtgctacattggaataacccccaaatacagatggtccctagacagatgattctgcagcattttctgatagctacagatgtccctgctactgaaacccagactgagaataccattctgaccctgccgtcaatatgcagagggtgcttgggtgaatctagcagcgcggtttgattctcgtaccgcatcgcagatgctaaactcccccatgctctctccaatccaaacctctcactggtcttctgcagaatttctaatgaacaagataattcattgtgagtgtgctttgaatgaatgaatgaatgctatttaaactacaaggtgacagatatttccatgtgcctcttaggaaattgcatgcctttccaagaagacaaggttgaaaagcagcttgttgttgttgaataagctcagcactgtctgtctgtttaggaaaaaataaataattgtttcttgcccacgagaattctggaagtggagctgtccagagctgacccgtctgtccacatttcaaatttcactttggagagtcctgggagagggagcagatgaagccatttcagaaatgtaaatgctgtttgacatctattagctcaatgctcatccattgctgacagcaggatccattaggacgcgagtgtcatggatcagagacatttgaaatatagcgagaaacatgctacccgcagcagaggcccatgtagatgacttgagagagcactagatgtgcccaccactgtggtccaggcacctcccccccatctccccaggctctctgtctggatttcccaaaggtcagctgcgtagccagtcttcacgactgcactctgtccaccaagcagcctgcctgaatgctgggcatggcggtgaccattccctccttgcaaggtcgggcttgcttctagtctctaccattcatggaatcatccaaatgatccaactccagatcaaaggccccacagggtcaccccttatttgtatagatgaggtaggcttgaacaggtacagtgacgtgcctgaggtcccagggggctagtgagtagcagaggagggatttggggctctaagccagtgctcttagttctcagggctctctgggttgtttttcttgcttcctttccttgcctcccacccctgagtccaggttctcccttctctgtagggtggcacagtgtccaacatatcccagagacttagccgccatatcctagtgatgggggtcctggctaactgagttttctagttaagttctatgttttgactttcgtttaagttatttctaagtgttttgttttcctgccttaggggatcggagattatatgggagggggcacatgatgacaactgttgttattaaagcctccaccatatgccatatgctatgctaagttcacttattttaacactcacaatagtccaatgtagccagatagtgtgatattctgttttagaaatgagaagacacagctttgaaaggatttgtgatttggtttgctgggcgtttcagtaagttggtgacttatttattgacctcactgtacctaaatattcattcctttgtggtgggatgtccctgtgtcttgctactgtagctttgctaggacccttgtcctgaggactctcagctctaaggcaagtctgcaaggtcacttctaaatggacagtccttgaaaagcttaggaagagcaggcgcatccatagctgtgcttgatgggaggggaacatgtggaggacagagggaaatggaaaagaaacgtccgagacaagacactgagaagatgctgccatgcctcggaaaagaggggaagatgctggtccaggctattagtcttggacaagcctaggcttcctccctcttgatacagactgtgggttccgggtaccgcgggactcaccctctctcccgcgccccctggaggtcagagggagagttacgttttccaggcccagagacctgatggcaagagactaagtagccgctgcagttggagcacagggaaccgcaggaccaggagactttacccagaggtcgcttgccctgaaccctacagttgagaattctgtggctcttctaccatgtgcaagtgtccagaaaagacttgcacacatatatctctcctatctgctgctaattcttagaacacccactgttagggcttcatcccctgtttctttatgaatacccccaaagtcacgttgggtcctgaaagaacagctgaactttcgttgagccacatcatctcctacctggaaactcaccaagcctgtctgcctcttcataagaaaagtaagacaggtttctcctaagacccttgagcccgatttctgttccatatttgtttcatatgacaggtctcaaactggtggctcgtgggccagattcagcctgcagccatattttgatttataccatcttggcctgcagaggttttttgtaaacataaaaatatttcaatatgaatgagttgccatcgtttgaaaataagggcattttaccaacagattcaaatatccaaatatacagatgatcttggaaagcaaaatgctttgataaccctgggcccacatgacctcatggcagcaacaggcttgggtgagagcagccgtgtctctgaagggaatacatgctctcctgcttttccacagtcctcaccactccctagtgcattcctcatagcgagactaagtgtgttagatacagttctgtagaataaatatgaccaagtagaaattccagaagacccatgctccttaaattacttgtgtggcctccatagacatttgagttttcaatccctgttttgtactaaggtatagaacttgttaattatggaccagtagagtcagatgtcagtaaggagatgggggagagaggaaagtggagggcaggagggaaggtggggaaaattagagtaaaggctgaagcaaccctttacctcctcagccctccttgaatgtctctaatgatgctggtgtctagaagtgggtccttgctttaggcagttaaatcttccatcattctatcttattttttgatatttgtgccttaatctataaatattcactctaggcagtacatttacaagcaaggttcaagcttggtaattaatatttgtgcctctctatgtaagttatgtctttaaaatgaggcaattgctttaagcatttaagacattccacgtatattgcagagtaattactttccaaagatatttccaactgatattttgttacatctaaatatacatttacagtactcagtagaccagaatagctctaatttatatatttggtccactgggttagaaaaagagacattttaaaagtatgtttttaatcagtgtgtttatcccaaagatactgttggctcctccagaatcacacgattttataaaaaataataaatgtggtgtgttctctgagctgatttagactttaatgagagatgacatctcagcggagcatgagcatggctaacttttaatccgggctccgaagtgttctagagcttggaggaacttattaactcccttggtgtcattttcttaatgtacaaaattcagatgataaacagttactgcccttgtgcagtgagaattaatgctttctgagtcgcagtattgttttgataaaatagtcttaattgtttgctttgtacattttctgctttattatttttattatttctcttgcctctgtaattggtcgttattgggttcccattatttctttattagtcattttataaaagctatcttgtgatttatcctccctcccacacttgctgttcccccaagtatcgtaaacagaggcaagacccaggcaaacaaagctggtggtattgttggttgctttgagtggctcgcccgttgtctttaggatggttcattcccaattgcttgactgctatgaaagaacttatatgaatcccaggaggtttattagaaacatgttctaagtaatagtaagaaagttggattaacagggtctgcatggaaactctaacctccctccctaaaggaggagaggagcaagatgagtctttccagcttggggcaggcatcgtaagtgtacaatgaccacataatatggcacactatataaaaggacaagaaaatcatcgctcatacagtgaaaagaagccaaactccattctacctaaaagttggctttctataacatttccagccaccattacattgggactttatcctactcttattactcatatgatctcattgagttgagagttgtctccttctgtgttctctaactattcagtgtagtttttcaaaattatacagccagacattctgagtatgatccaatgtactggttatattactttgaacaagttatttaaacttctgtgctttggttttctcacatctaaaatagtggtgatagttctatctacctcctatggcagttgtatggattaaatgcatattaaaaagcttagcatagcactggcccaccttctgagtaggctctatattagccatcattgttagctattattcacccacagttggggctggggttgcctggggttgtgacttctaattctaagtgggcctgtagtatgggggactaggatgtctttggtgaatacttactgaaatgcattgggttagaaagccttggatttaactggaccaatttattttctttcctcaaaactgagtaatcacatttatccaccatttcagaaagagtagatactaataacatgaaaattttagaactatttatgcagcttattgtttctggctatatgggaggctagataacttagctgactctcccacttaaaacaattttaaataatggataaaacatttaagcaatcctttaaatacctcagtgagaaagcaggaactaaagattcataagaggccaaaaactcagagaaagttgggttctaaagcagacttttgctttgagagtatttgcccaatgcaggtgaccttgaactctgattgttacgacctcaagagatatggggacaggagtcaagcctagggcagatcagtctgttagaaaacctcctctacataaaagctgagaccccaacagaccccagtaggctacctctctagtgtaaggatgaaataaaaataaacatgccctgtcttctctcaaggatgtgtgaagaaaattgcctgccttaaaccttgatgctgagtgggagccaaaatgtttcctctgagaacaggaaccacaagctaagctttcagtagaattcatataacagactagtctgagaaagcctcagccaagaattttgcttgaaacagtcctggttgatagtgttcctaggtacatggtagagcaaacacaaatcctatgtaaaagaactcttcttcagtattggcctcaaataattttgacagttttccatccaaggaatatgagctcccagttaaaatttgtaaaaatgaaaggatgcaaaacaccaaaagaagagccagcagaaaggaactatgaagaccagataatagaattaacatttaaaaaactgtgcatgctgtgttataagcaataaaaagggagctgaaaatataaacaaagaataaacctatagaaactatcttgattatttgaaaaataaccaaatagaatttctagaaattaaaaaaggtaattgaaattttaaaaatcaaaggatagacttcagagcaaacagggcataactgaagagaactggaagatacatctgaaaatgtaaccagaatgcaaggaggagacaaagctatcaaggttaggaggcaaggagactaggataaggaggactcagtcatttgtaattggggttaaagagagaaaacaggaagagtaatattggaagggataatggttgaaaaaagtttgcaaaactaaaggaagacagctatcctcagatacaggaagcccagtaaatcccaaataggataaacaaaaagaaacgtaaggctatctacaacaaaaacttgcagaatactaaggacaaaatgataaccctcaaagtagctagagagaaaaaacagattacttatgagagacttatagtttatttcccagtagaaatcagaaagcattggaatatctttaatatgctaagagaaaacattggtcaatctagaattttagacctattaaccatgttccacaacactcttactcttattttctgttttttcccttcttttttcccccttcaagcttcaatctacctttgagttcattaaccttttcttcagagtttttttatgttaattctagccagtgaattcttaaaattcaatataatattttacagttctagatccttttgattctgtcttatgggttccagttctccgttgagctactctttcttttctttgccacacagatgatagtaattttgaagtcctctgtctgctaatgccagtagtgttagtatctctaggtctacctcaactgatgattttatctcatgattacaggttaccattttttgctgttcatgtttagactttgttaggagatttttttttggtttctccctcagttgtaatgtataggccttattcctaggatatgattcttacccataggacaaagcctttttgtgtagtctgaatatcaactagtatgctgcaattcatttctgccactaaccccctggagttagcagacaccctaagttaaggactcagtcctctataagactgctctcacttcaaacgctaaccataggttcagggttcccccaagtcacctgcatttctgacctactgactataaattcttgactataaacactgaccataaatcctttccatgacacccttaggtttgataattcatagagtgactcacagaactcagaaaagttctatatttttgactaccattttattgtaaatgacacagatgaagccaaatgaagaaatacatagagcaaggtctgggagggtcctaaatgcagagcttccatgcccacttcccatgaaatcaggctacattgttctcctggcacatcagtgtgttcaccaaccaggaaactcttctgagcttaggtgtccagggcttttattgggattttattttgtaggtattatcactttaatgattggccgggtaactttaatgattggccatgtaatccagcttcccctcttgtcttagttaattttctggtgctataagggaatacctgagactggttaatttatttatttttttaaaaaaagaggtttattttgggtcatgattccagaggctcaggttgccaaatctgatcatcttctggtgagggtctcatgcttcatcataacatgggggtgagctgagtgcttgccaaaagggcaaatgcaaggacagcctcactttatagcaactcgcttttgtggtaattaatccagtcccatgaaggggaggactcccacattcataagaattaacccagtcctgtaagagcagtgttaatccctcttaacaacccaatcacctcttaaagcccccatctcccaacaccaccacactggggaccaaatttctaacacatgaattctgggggacacactgaaaccatagcatttcacacctgccccccagaatttcatgttcttctcacaatgcaaaatacaattattccattctaatagtcccaaaggtcttaacttgttccagcacaaactcaaaaatccaaagtcttacctatgagcagcttgtggaatcaaaatgagttatctacttccaagatacaatgaatggacaggtataagatagacatttcccttctaagagagagagagagacagacagacaggcaagaagaaaggagtatcaggccccaagtaagtccaaagccctacagggaacaacattaagttttgaggctgcagaataatcttctttgactccatgtctcacacttcagctctcccagaatggtgttgcatgctgtagctccatggttctgaagtctttatggtgattccattcccatggctctactaggcattacttaatgggggctctctgcagtggctcaatccttctgacaagtctcttcctgggcccccagggtgttcacaatatcctttgaaatctggggggaggaagccatgcccccatatctcttgtattcttcatgcctgcaaaattgatgccacttgaatgtcacaaaggtcaacttgtactttctagagcagtggcactagctatacctgaagctgtggctgggttggcagaggagtgctacgctggaatgtggggaacagagacctcaggaggccctgggaagcaagcctgtggagggtgccctgggctcatttcctgaaaccattctgctctcctatgcctgtgggtgtatgatgcaaggagcagccttgaagttctctgaaataccttcaagatctgtcttctattgtcttgcttatcccttctgtctatactaatctccttaacaaaagattgctggaccacatctttggtttcctctcctgaacacactttttcactctttttttttttttttttttgagacaaagtctcgctctgtcagccaggctggagtgcagtggcatgatctgagctcactgcaacctccgtctcctgggctcaagcaattctcctacctcagcctctcaagtagctgggattacaggcacgtgccaccacgcctggctaatttttgtatttttagtagagacggggtttcaccgtgtggccaggctggtctcgaactcctgacctgaggtaatccacccaccttggcctcccaaaatgttgggattacaggcatgaaccactgcatccagccactttttcactctttatgtggccagcctgagaattttccaggtctttccactttgctacccttttgattatgagtttcatctgtaagtcactttttcctctctcactacttaatgtaagtggttaaaagtagccatataatagcctgaatactttgctgacacttagatatttcttctaccatatattctaattcattgctcttaagttctacagtccatagagccctagggcatgaacacaatgtagccaagttctttacaactttatagtctttactccagtttccaataccttgttcttcagttccatttgagaccttgtcagagtggcctttactgtccacatatctgtgaacattctggtcatgaccatttagataatctctgagaagttctagactatccctagttttctcttctgcaccttcaccagaattaccctaaatcctccattcatggcaatataggctttttctagcattcacttttttggaacaattttggaacaattcacaaaattgttccattgtctagttccaaaagctgcttcaacattttcaggtatttgtatagcagtagccccactttttgtgtcaattttctcttagtccattttctgttactataactaaatacctgatagtgggtaacgtataaagaaaagaggtttgttttggctcacaattctggaggttgagaagtccaagatcaggcagccacatctgggtgacttctggtgagggcttcatgctgcatcatgacataatatagtagggaagtgggtgggtgtgaaaaggggaaaactcagggagaagccttgctttataataacacactcttgtaactaattcagtcctgtgagagcaaggactcactcacttcctcgagaattaatccagtcctgcgagagtggcatgaatccctcttagtgacctaatcgcctcttaaagactctacccccaacactgccacaccagggaccagatctcacgctggaatcttggggagcactctcaaaccatatatgggagctctttttgtccagaagtcaggctagctctaagacctaaccctctactcacatggttgatatttctggtgaccagcccctgtcctgagccatctcatctcttaatgtaaactcaggtgtgatataagggtgtgatataaggtgtgataaataataaagatactcctattactccaaggattttctccctttcagaaaccagggacaaataccagtcaaattctttattataccactgggtctccactgcccaaaagctcagagtatttaccaagctctctatactttgactgggccagaatttcacctactcagtgctatacaacctgtaaaatctctgttgagctcttagctccccaaatatttccaggcccctgaaatcttgctgctgttcctacagcttaggatttagtccgggaccaaagagaaaccctattcaggcttttggggctccttttctgtaagttgctcttatcctgagctcaattccagtctcagaaatctcagactttgacatctttttcttctgcctagtaagactgctgctctctacttgagctccatttccctgtgacaaggtttgggccgtgaacccattaaaaactaccctcaggaagaaaacgggggtgagtgtggtgctcatctcgtgtgttttctttctttcaagaatagcagcacatgatgcctgcctccagggcctagaaagaattgttttactgttctagtccagctgtacagtgatttttaagtcaaacaacagctattttattgaagccagaaccataagttgccaatgtttcctcagtatagaactttataccatcaaatatctttgaataaaattttaaaatggagacatttctgaaaaaaaaataaaagatttttaacacaccttcatttgtggcaattttaatggatgttttccaacaggaagaatggaaagtctaagatataagaagcaataatgagtaaagaaagtggcaatatttgggttaatatttgggaattaatttaattttaattaattaattaaaagtgggaatatttgtgttaatctaagtattaattgcttgaaataataatgtctcataactttaaaagtttggcagaaaatatgtgaaaatatagcagatcagtcaaaaaaggacaacttcaaatttttgtactgaaatccttgtatagttgagaaaaagaaaaaagatacctataaacttaattttgataagtatagagggtaaaaatgtctaaggaaaccactaacaaagcataactttcaagtttagtagtagacaataaatgaagtgagaaaaatattcaaaaaatctaggaagaattcaagggagaaaatgaaaaatagaaaaggcagaaaaaatagaaaatacaaaatattagctttaaattcaagtatattagtaattacaataaatgtaaacaaaccaaatgttccaattgaaagataatagttatcagaatagaaaaaaaaggcccagctatttgacaaacaaacaaacatatctaaaatacaaggataaaggctgaaaataaaagatgaaaaacaatattccagaaaaatagcagaaagagcctggtataggtataataaagtgaaacacaatataatagaggcataaagcataactagagagtaagaggaccactaagtaataatagattaaattcaccaggaagataataactattccaagtatgtatttaccgagtaagatcagattaacatgtaaagtaaaaattgacagacttataaggagaaatagataagctcatgatcacaatgggagctattacataatcttaaataattccattagaagagaagaaagaggctaggcatggtggctcatgcctgtaatcccaactctttgggaggctgaggtgggatgattgcttgaggccaggagttggagacaagcctgagcaacacagtgggaccctgtctctacaaaaagataaaaaaattaaccaggcatgatagcacacacctgaagtcccagctactcaggaggctgaggtgggaggatcacttgagccaaggagtttgaagctgcagtgagctctgatggcaccactgcactccagcctggtggcagagcaaggaaaagaaaaaataagacaggaccaaagttgatgagttaaacatctccacctcacaatgttaggaaaagagtagcagagtaaacccaaataaagttgaaggaaggaagtaataaagaacaataataaaaaggaatggataaaattgaaaaaaaaaaagtacaacagaaaggttcaacaaagccaaaggctgatttttgaaagaaccaataaatctaacaaaactatgtcaagagtaataaaggaaagaggagagagggaggaggagggaataaatacacatatcagaaatgaaaagaagatgtaataattaaagctgcagaaatcaaaacaataatagaatcttatttcaccaatatatttgaaagctctgctggtcaaatttcctgaaaaaaaaatttgtccaaactcacttcagtagaaataaaaaacctaatcagtcttagcatcattcaagaaatataatcagatttctaactggaaatcttcccacaaagaatatgtcagatccagatattttaccagtgggtactaacaaattttccaacaacaacaattttcatctcatatgaactactccagaatccagaaaaagtgggtatattgatgagaataacataaacttgacaccaaaacctggtaagaatgtttttttaaatgccagtttgtacataaatacaaaagtcctaagcaaaaattagcaaactatatttagcagtctattaataaaagataaaccataacaatttggatttatctcaaactatatttgtttgccactagaagtctcttgatgtatttcaccacagaacaattttaagtggataagtcatataatcatctcaatagatataagaaaagtattttaaaaatctaatatccattcatttattagtgtaagaaaaaattcttacactaggagaaccaaatagaagggaacttctttaacttcaaacaccattttttttaaaccagtagcaaataataaatgtatttagtatataatgcgagcaaggtttttcactgttaggaaagggttttacagatatggaaagtgggaagtctagaatggtacatttgttttcagatgggagttggaagtatcagttaagtattgcttaaagttaagagtgtgtgtgtgtgtgtgtgtgtgtctgtaacattctctagctctgtgtgctgagaaggcacagaagcagtgatactccagtagcaatgtacacccctagcagccaggttttccactgaagggaactaagcttccttgagaagtggggaaatggagcagaaaaagtatacaatgaatctggaaggttatttggtgtcagaaaaataaagcagcgctcaaaacatcatggggacttgtcaaaacgatacaatagtcaacttaaaggactcatgctggccacatctggacaatttgagctttaaaaagaaaaaaacatgttaatggatttgtggcatattgtatgtttcaaagctagccacaacagtatcttccatttcacatattcttcttacaatgtgtctttgaccctcctcttgttgagaggcagggtctatgtcccctcgtcttgaacctggggacttttgtggaagtgatgctgtaggacttcgaggccaaatcgtagatgacagggtagcttccaccatgctggctggaacactcatgctggagcctaagccaccatgtcaactgtctaactgtcctgaggtccctgtgcaaactagtccatgtggaagaaccacatggaaagagcctgagacagcctgaaaagagaagaatgccacatcagcccccaacagcttcagctaccatctgacaacaactgtgtgagaggcttctgagctgaatccacctggctgaaccctccccagatatctgacctacagaaatatcgagaaataatgcaacgcttgttgttgttttaagtcactacgttttgtggcaattctttgcatagcaataggtaatcataatagattggggacaaaaatatgagatgacaccatgacaaaacctcaaaacacctgactttggttttggtggcaggaggcattgagactgctggtgaaagcttgcaggggctgtgagagcgggctggcagagtcctgaggaggctctcagtgggcacttaaagtcaagggaggaaaatgttccaagaagttggatggaagaaccctggatgtggggtagtgggtggtttaataatattgtcacctctggtaatgcagtaagataggaaatatgctaaataaacttgatgattccactaaagaggctatcagacagaacttagaaagtaccaccagattagtttttttgtttgtttttttctttctttttttttttttttttttgcctatgttaaaacatgagagggagaggtgagctggaggacaaactgttaaatataaaggagccaagactcaccaggcttgaaagtcaaacttgttccatttccagcctctcaaaggtggtgaaaagttgtcaaattaagaaaagatttcaggtcaaaaagaaaatccatgaggggtacctataaggttctttgttaaaaacctcagaaatattcaaggtatcatagactcttccatccaggaaaaaaaggaggacttttacagatcttaaggtgtgccttgctgctgaacaacagggcttctagcatcttaagagcattgtcccatagggagcccaggaaatggtagggtttatcttgaagagatttgtgagtttggcttttcttggaaaaagtatgtattagggttctctgcagaaacagaatcaacagagagagagagagaatgaatgagtgcgtgtgtgtgtgtgtgtgtatgtgtgtgtttaaaaatgtgtttattttaaggaattatctcttgcaattgtggaggcttggcaaatccagaatctgatggggtaagctggcaggctggagacccagggaagggttgcagtttgaatctaaaggccatgtctgctagcagaattccttcttgcttgggggaggtccatttttgttctattaaggccttcaactgattggatgagactcacccacactatggaagataatctgctttactcaaagtgtcgctattaaaatgtttacctcatcaaagaaaaaaaaaaaaccttcacagaaacatccagtaaaatgtttgatgaaatatttgggctctatgacccagccaagatgacacactaatcaccacagagtacattgtaaactgatacactaaaagaatgcaagtttgttttttcaaaaattatacaagcttaaactgtaagtgatagagacagtgcaaaatgaagaggtccctgaatgtcctaacttctacaagaaggaagcaggctgagaaaactacttaacatgggttactttgtatggaaaggaagaaagactcaaaagggtggagccaagagccctggagaattattcctggagtcgaccggagccctaatcaagggactagaaacaagtactggctaaattgcagaactgctatgcatcagcacctgatgtgtgcctcacattttctccctttttaaatgaaaatatctgtagaagttgtcctgtgccgccccactgttatgcatgggcctgtggagtgagtgtttacaggtcttcagattcagaggaatggtgtgcgaggagctgaatcctaggaacctcacatgagaagtcttgtctgaacctggacctgatttagataacagataacctgatttcgatcctggattttgtgctgctgcactaatagatttggggatattagagagaggattattgcatatgggagggatgtgaattgtggccagagggtggatcatagcagattgattttccaaagatggcagcagcaatatctctcatcacgcatatccttataacatgaatttgacctttcttccatgtagagatgggatctatttcccctcttgaatctgggcaggttgtaactgtggcagatgtgattctatatgacttctaaagctttgtcatacaaatgacaaatcatcaccttgccggctagattgctcacggtggatccccgaaccaccatataaacagtgccctgaggttaccatcttgtgaaggagcccaagtgagccaacatgtagagaccacgtggagatgctctgaggccacacgaagagaaagagagacgctcaacaagcccccagctggctagccccccgctctcccagctctggctgttgtctgactctaaccacatgagggacccagagccagaatcacttagctgagtccatcccaaattcccaacccacagaaaccatgaaagataataaaataagtgttgtgtcaaactcccaggcttttgaatggttacacaacaaaacataactggaaaataattataacacactgaataaaataggagtgcatgagtccctacatacataaatgaataaataagtagatggacataaaggaaagctcttcctggtagaatgccagataagaaatatagaaggaaagatggagttaaaaaaaaaaagtctcagcagatacggaaaaccaacagtcaaagtttgatgaggaacagaatatttacatattctgcaagtgtttctccacacattactttttaattacaaaaggtggatataaccttaaccaagcaattaaagctagcatcaccaatattgggatgaatcaacatcatatgcctcttgatgtgatatactaagaaggacaaagtgtcaattctttggtattcctgtgaaaaatttataacttgaatcttaggaggaaacatcaaacaaatccatgttgagggacattctacaaaataacttgcctgtacccttcaaaaatattaaggtcaagagacagaaaggctgaggaactgttccagataaaatgagactaaagagacataacaactaaatgcaatctgtgatcctgggttcgaacctggactaggaaaaaaaaatagatataaagacattattgggataattgacaaaaattgaatatggactgtggattaggtaaaagcatcataacaatgctgatttctacagttatactgtaggaggctgtgttgacctcaggaaatatacgctttaggattaaaggcacatggggctttagcttgttctcaaatggttccccccaaaatacatgtatgtactgtgtttatatatgtataaatatatacatgtatgcctatatatttatatatatatgtgtgtacatatagatacacacacactatatatgtgtgtgtctctgtgtgtgtgtgtgtgtgtgtatatatatatatatgtgagagagaaatgataagcaaatggggcaaaatgctaaatctgagataaagtataggagatccttatactattcttgctatttttctgtgagtttgaaatgatatcaaaataaacatgagcaggatgagagcacctgctatctcacttctatttaatattgcactggaggtcctagctagtgcagtaaggcaagagaaagaaataaacaatatgaaaatttgaaagagagaaacaaaactgtgattattcacaaatgatatggttgtgtagaaaagccaaatgctctgtgaatacattactaggataactaatatcttttaataaggttgttaaatacaaaatcaacatgcaaaatgtaattgcttatctgtataacagtaacaaagagaaaatgtaatttaaaattgataccactactggcatcaaaaatataaagcaagaatgaatataactaaaatgtgtaaggtcctcatggagaaaaaattatgaaactttgttgaaggggctaattaattaataagaaggtcagtattgtaaaggagtttattctcccccaaaatgaacagtgtattaacttgttatagaaagtatatgaatgagtgtgtgtaatttgacaagcaggttctataatttatgtggaaaccaaaggaccagaaataatgatggccaccctaaagaaatagcacaagacactgctggtgagagcagaagcttgtgcaactcttttgggaaacagtttggctttatttaatacagctgaaaatgccgtactctaggaaccagacaccccactcccaggagcaacctctcatagaatcttttccatatttgcactgggagacatgaacaagaaagttctagcacctctgttcataatttaaaattataaacaattttaagatctagcaacagaggaatgtataaattctaaattgtgatatagtctacagtgataaagaatatagcaattatcctataataatatatagaatataaagagatagatctggaatactatacccagagtgaaaatgaatgaattacagttacatgtaataaaattgatgagtctcaggcacataatatttggcaaaaagaagcaatgacaaaaacaagtaaaattattatacataaattatacatggataatcactgtattgttattttatatgccacatatactttataactactttgcttctattcataagttaattttaaataattttaaagaaattttaaatatttattatggcattgattataataataaagtacctttaaatgtcccccaaaagtaattgactgaaataatgacaatacaatcatgccatagcatactaaacaaatatttaaaacaatgttacacctttacaaatattttgttgaaatagaaagttgttcacaatatgctgttaagggaggaggaaagcaagttctaaaaatagaatgtactgtaggtttccagtttctaatctgaataaataaataaatgagataaatatggaagaatatagactaaaaattgaggtttatttctgactagtcagttggaataatttttctttccttcgttattatctgtattttctaatattttcccacaataaacagatactacttttataatgggggtaaaatctgatgctaaccagagaccagtgcatgcctttccgtcatgtgctcagttcattcattcattcacttgcttattcaccattccgtgtgtatttgcagaggatctactgtgtgtgagaggccctctgcttggtgatagcgaaagaaagatgaacaaggcattgtccctactctggagcagttcagtctctcagtctctgtgtaaataataacctagtgccatatgcactattatgacacaaaacgacgacactcattagtatgagaatgtttacttcctcttcacttccttcagtccaccaaagaaaatcccataatttctaacccaatttctatcccccttgtcctaatctacttggactgctataacaaaatgtcatagactgggtggcttaagcaacagacatttgttctctgccgagaacagctcggtcggggagaccctaacctagcagcgctagaagaattaaagacacacacacagaaatatagaggtgtgaagtgggaaatcaggggtctcacagccttcagagctgagagccctgaacagagatttacccacgtatttattaacagcaaaccagtcattagcatggtttctatagatgttaaattaactaaaagtatcccttaagggaaacgaagggacgggcagaattaattgcagcaggaacatgcccttaagacacagatggctcaggcttttgtttgtggcttaagaatgcctttaagcggttttccgccctgggcgggccaggtgttccttgccctcattcccttaaacccacaaccttccagcttgggcgttatggccattatggacatgttacattgctgcagagatttttttaatggccagttttggggccagtttatggccagattttggggggcttgctcccaacagttctcacagttttgaaggctgcaaagtccaagatcaggatgctgaccagcttgatttctggtgagggtgctctacctggcttgtagatagctgtctgcttgctctgtcttcacatggtagagagagggagagagttctctgtgcctcttcttatgaggccaaccatcctgtcagataacccccctccttacgaccacagttaaccttaattaccttcttgaaagtcttaatgccaaatatagtcacattggggattagaatttcaacatacgaattttaggcggggcacaattcagttcatagcacccctttttccttcttttctcattaagaggcaggttggctcacatattaaaaggatgaaaaggaggttgcatggaaaaaaggaagggagttgcagagaagctgggagtgaagagattaagacaattttgggagagatgctggggacagctggggatgtgatgctggggacagctgggcgtgtgagggaactgggggagaaaagaagggatgttatcaaatgtctccatgaattaggtatttgtatcctagtaaccatttttgaaaaaagcaaggaaagaatttgtgttgttaaaattatttttgaccttggggctatgttccttcaaccacattattcttctgaggctggaccttatgagttctgaatttaatggttccacaataatagtcatcatgggcacatggagggcagagctatctgaaacttcatcactaggcataaaagtaacaggaatagtgtgaagaaatacatcagaatataaggaattcattactgtagttaaatgtattagaaaagatccactttttatcctggaactcagtttgccccgtgcctggacttgtcccagagttagaaccaaattctagaaggcagagaaggcctcgactcactggaaaacagcagagggaatttcttactgaccttttcttaaactcaagtgacagaaaaataatgtgcatctgatagtttaggatgatttgttagctttaacatggagtctccactatttcataggagactcaatttacttatttggttttttttttttacaatcaggttttttttaatacaaccagtttattttccaggtgatgggttctttgacttccttgagtccagaactataagccaataactttctgtttattataaattagtctcagataattctgttatagtagcacaaaacagatgaagacaagtaggtgctgcaggagaatgttaggcccaatgtacagtattaggcctgaggtttcaggaggagatgtagatgaggagcactgcaggaggagcactgcagcaggagcaaggactcgggggagccagagctgtgggagcacctggagagagaagttggggcaggaaagggtgatggggcaggatgaagactcctcaggggcacttagatccaccacccactcttccttattgaggctcacagtccatctgctctggggtgggcactcagggtgactcatttccaatgtgggatgaggttgctgatgaagcgaatgtttgttccgctcctcactaggttttgctgaaggtctgtcctgcccaaagcagggtggagataactgtgaacatggagagcctggcttagttttcctattgctgctgtaacaaattaccacggactgggtggcttaagtataaacttactggccaggcatggtggctcacgcctgtaatcccagcactttgggaggctgaggtgggcggattgcttgaggccaggagttcaagaccagcctggccaacatggcaaaaccctgcctctactaaaaatacaaaaaaatagctgggcatgttgctacaagcctgtagtcctagctacttagaaggctgagatgggagaatcacctgattccagggagtttgaggctatagtgagcagagatcacatcactttactccagcccggacagcagagggaggccctgtctcaaacaagcaaacaaacaaaacccaacaaatacccagaaacttattatctcacttctggaagtcagaagttgagatcagtttcactaagctaaaatctacatcatgtagattgtgaaagctacatcatgaccatgaggattatttttggtagctctaattccatgataaagcccacaagtcccctctgtttcttgcataaactcgtagaatccacgaagtgctgtttgttgctgagcaggaatccctggaactgtgccctagaagtttcacagctgagacagggtctctggggttcatttctggttggatgcttggggtttggagatcacctgccctggctgtgttttgtcctctgaatggtttttctccaggtactcccttgaccaaaggggagactccagggcccttgaccaaaggggagactcaggattggtactctaggactctggctggccagcccatctgtgaccggcctttctgagccaggatggccacaggtgacattgcccctactgatgttgttaaaggaggctctgaccttggttatcagagcaaatccagcgtatgtttaccgtgcaatgtacatttttgtcctgttgtgttcagagaatcagaagtccttatggggtagataaggcctggttctgacgcccagagtcctgtttatgagtggctcatgagaggggcctctgttctgtctagcagggtcttccttgggagctcttaagtaaccagtgtcctgggttaaccggaatacctccctccctggccttgttctacaatagaggctttgccgtgtgcctacacaaccaaaaaggaagctgtttctattcccaatcagatctggagatgatattgaacataattctctatgttaggaatgtagaaaatacacagcatggaggggataatgtggggcattttgtggtgactgtagattcctggaagttatttataatagttggcctatggggctgccaacaagtgcagaggcagttcttctttctacatgctctaagggagaatctatttccttgcactttctagtttctggaggctacctgccttcttggcttgtggccccacatcactctgacgtctacttgtctacttctgtcatcatgtctccttctccgactgtgaccctcctgcctctcttttagaaggacctgtgattgtattgagccctcctggatcttgcaggataatttttccatccaagatccttacctcactcacttctgtaaagtccgttttgcagtgtaagagaacatatgtataggtaccaggcctaggatgtggatatctgtggggccgttattccatctattgtgaggcatgccctgttccatccctgacctggagtgtacttggttttccttcccacagtaaaggcatgcagattattgaagggttgtgtcctacggggatggatgccaggaatgagctcactggaatgctttcagtatggttcctttgagaatatgactgtgagcgaggagtctgatgatttccgccctatcaccaaacctgtggtgctgtaaactaaagcttgactggcaattggagaaggatcatctttccctttctactttctcatttcacactgatttattgcaagttgtagctcacagtcttagcaaatgaaacaatttgttgctcactccatcgctgttcattccccagagctgagaggcctgcttagaaaaatgttcttttagggaacaaatgcagtgtggaggggcttggctgctgccagtgtggagggatccacactccacactcagctctggccctcagtctttccaggggatattccacggcagaagtaggacgcttaaggcctcatgagtcatgggtaagaataatcctgaaactcatgatgtgggtccctctctgacaaggtgaccacagagattagggccaaagtcagggccccagacatctcacttcctcccctttcatgcctcactcataccactgggggacggggtcagcacattcttccaaagaggtgccttgtaacaattgctttaaaggaacatgttgacaagaaggttgctaagatttcgatggaaagatgttgaaagaaaccgtgtgaagagagcatcccatcaatgatcagccagtgagacacaaggaggggtcagtccgtgtgtctgagcccatccttttctgcattcgctctcccggcaaagaagaatatcggccctatccagggccgagcctcatcttcagtcccaccttctagatgtgagtctggcccatgtccagtctgggcacagcctactgtggtccaggcttgcgcagcatttggcactggggcaagatcccatatcagagtctgtgggtgttagagggaaagaccacggagagcccactcagggcctgtgtgagtctgagtctctggcccagctcagcctgccaggtctctgcactggggtgtggggcctgggtatagcccttagttaggggtttcttggccctcctctgtcaatgtgccttgtttatcttggggctccatggtgaagggtccctgttgtcggggcagggtccctggccataggtccacctaaaagtggcacagccacacagcaatttctagctggaggagatgaggttctctttctagctaaactcatatgttctccaggacacatgcaagatattatgcctgtgtcttatcttcttcctcaccacaatctccttgaaggcagaaactagatttgcttcatttaagcttatttacttgtctttgtcttcaaggcacctaggctagtgttgagcacacaatgcatgtcacgtgactgaggattacacgtgggccctgagaactgctccattgtgaatgtccctgagcaggcagcgaaggtgctgaggtgggcacctggagtccagcaaggtgtttttaacctgctgtaaccttgaattccagcatgagtggggaggcatttctgcggctcctaacggtgctatccagggccgcagtgctcttggctcatgctgcagcttcagaagatgctgatttgctagttttccctgaactgttttttcttctctctgagatcagtgattcccaccgtcggttttacagcaccccagggtgtctccagctgtctcaagggctggcacagaagtctcaaaaccatttgcttcaaacaaaaaacaaatacacagaatacagcagttttagctgaatttggaggcaggaaagaaaaaaagtctaacaaaatccaaacaagcaaattgggtgtcacactccaaaaagctggactcgctgccttagaaaagagaaatggttacacaaagtcacgtcttcatgtactggtttggatccgtgttctgaggactgctgcacaaatccaatcagacaggacgcttaaaaaaaaaaaaacccgaaacattttattgctttattttcctttcccatagaaaataaatattacacagatgaatagcaatatacaaaaaaccattcaacagagttctgaaccagcaactctgaagggtgagtcttcaacgaagcagaactttaccatttgctgagcctctgtttaggagagggtttagaaccagaaatgccctgtctgggttggggatcttttagctccttgatcaggcaccagggaggcagtgttgtctaattatcctcatctataaaatggagatgataataatcatacctcataaagttaggagaattcaataaattaaaatttatgaaaatcttaaaacagaggttggtgcatagtaagcattatgtcagtgtgtgctcaagaaagcattgggagcctgcaatgtaccaggcctggtgctagcttggtaggttcctgggctgactgtttgtgtctgggttggtttttgtctcatagggaagacagagaaggagacacctgaataaaataccttgtgatgaatgctagttccccacagagtcatgtgaggattcttaattaaaacatggattctggtgctggcatttgttgttaatattttgggcaagtcatttatcttttctgagcctttgggtattcacagggaatgctaggttccaataacaaatagtctccatgatttcagtggcttcacacaatggacatttacttcttgctccaggaacaattctgagcaggtgttcagattgtcaaggcagctgtcttccacatggccattcgtggatccaggctgacaatggcttccaagattaccctggggatcagcatcccaggcagccggagcaagagcatggaggctcccccatgcctgtgggacgttctcatgggccagacctggaggtggcactgctcactgccatgcacattctcatggaggagacttaatcacatggccacatctaatggcaagagaggctggagatagcgaacagctctgtgtccaaacaagaacaggttttactagacatctcaatttgtttatttctaaaatatgaggtggtatccctgccatgctgacttacacgggttgttgggggaaccatgcactataatggatatcaagtcacctgggatggaaggagctgtgtggacaagggagttgttggctgggaacagtggccttggcctgcagaagagtggggcaggggttctgctggtgtctcagcagcacaactcaattcaaaaagtgttcacagaggagcgtgccaggctctgccctgggtgctagggatgtagtcatcccatgacaagctcagggaggaggaatcacagttcagcgtgacatgtagcatgagagcttgcatgtggtgtcgaatccagacgcggtggtcaggacatccttcccaaggacagggcatctaaccagagaacagaaggagatggcccagtggggcagggtggggcaggggccaggtggagggagggtgtttaaagcagagaaaattccatgagagcaagagagcatggcttgagttaggaacaaaaactcaatatgagcagatgttaaatggaggagaagaagccaagagttaccagaaaggttggcagagcttgtaggccatagtgaggcctaatgggcagctcacctttctgtgggaaatcccccctttgttaaaggtgacttatttcttagagccataatagtgtgtctttgaaattgttacggaaacagcaagaggggacatggcattttacctgcaaccacattccacctgttccactgtgtacacctgaaccaaatccctgaaatgataacacttatcaaggttattctgtggtgcttgggctaaccctgatgaccaggttcaccctccttcccaacataggcatctggcttggaggagctaaattaataagatttgtgtcttaataacttgcaggtgagtgcccagtgttccttgggggtgggaagccaagcaaggccaaggctgccatgtggggtggctgacccctggatatcaggggggttacttggactcttttgtctgggcccagaattgacatagctgtctgggccaggcaccctgctggttatcactccatagctcagtctgtgtgtgatgtgtcttttgcaccttcaccttcatgtttccaaataaggaaaagtgcaatggagagaaggggagaatatttctataatgtgaatgactcttgctactctgagttccctcagctgttcagtttataattcttataggatcagttcaggcctgcatttccagggatgatgcttggctgtttaacagcattttatgtctggaatgcttataacatcggtcagttatgcagtgaatgcacttatgggtgtgtgtgtgtgtgtgtgtgtgtgtgtgtacacgtgcacatctcagagcaaaagagatcacaactgagaggctgagagaacagacactggctagccctgcctgatttgggggtgaaccctggtcttcatgaggagtcagaagcagtttctagtgaaagtagcatgtctctttgaggcataaagcttcaccagtcttcttggaaccttgactaatttttgattctctggttccatgagccaagcattatactaaaatatacccctcaatttgcagagaagtggaaggtgttcaaacacagaatcaaaataaaggataattttccatcttctgctgaaacctctcattttccagcaatgtagaaacaaaacaagagacgagaggacatgtggggactgagaatgagtgcattagcagtcttttggagatacccacacagacctgatgagcttctcaggacagagggctgcactcaggattcatcctcatccacagtgattgtggctgtgtggacttacacaactggcagcttgctgccagttgccgctctgttgggtaggaaaaaggaggacttggaaactgcctccggagagccttttggaggtgaaggaagttggctggcaactctgtccactcaagctcaaaacttcagcccgttcaccagctcctgttggtccaagtctgaattgtccaggttggccgacaagttctgctccttctcctgtttcgcattcatcccatctcctcctgctactcccatgtggtcaaagtcctcatccccagctccctgcaaaggcctccccatgagcctccctgaccctgtctgcatagcgccacttcacaactcgtccgcaaatgttatcttctcaccactggccagctcagttggggttggagtgtgtgtgataagctaatccacgtggagatctaaatggcctccaggggtcattaggaaccctcactttttttctgcccaaatttcaagaccatccgtgggggatccttaccctacctctccaataggagtcgcaccctaacccagcaagtccccttcgttctggctgtacatttgggctttccctatttgtgaatggattctcctcttcctccaagacccagctgagatctcatctctgcaaagacttctcagttccctcctgttcaccttctttccctcaacactcaaaacccacccctcattgtccagtgcttgataatgaggctacccccttggtttcatgaattgcttcatctccccagctgtatagtgaagagaataaaaatagccacagtgtattgatcatttaccgtaggcctcataaatatcatggcatttagtatgtccaataactgtgtgtgataagtatcaatgtctcattgtagttagaaaatcacagtgctaggtatcaaagctgttcatctgttaaagtcgtgctttcctcagggccctcagtgtgtgtgtcccgtgagaggtgctcagtagacagttgagagaataacaagctgctccgtctcccccatgaccctagcacccagcacagtgctgagcatgtaatacatgctcaactaatatgtctttgacagacatatttgaaggcataaagagctaggagaatattgacagttcccactggctgatggagtaaaccagggcttcaggagtcagtctagaagtccagattctggtccgagtcctgcactggtcagctgagggacctcgggtcctgctcaccccaagactcaatttcttcatttgcatgacaagggcttgtgcacaggttctgtgaactctggaattcttgatgcttttactcattccctgaagaggttaattaggacgaagtgctctttaactggcaattacactgctgcgatatagcttgtttagtgaggccggcatcattgccaaggccaggacggtttctgatgatcatttgccagtctcaggagaacagagaccgtgaggagactgcttaagatgaataagaaactccccccactcaccatcaaatgagaaagctatggatccagagctggggaacaccactgggcaggatggtttcaatgcccctaatttagcttgctctaattctccctaagcagctctttctcagtgggaaacaaagaagctgcctttgagtgggaactctgtgtatccttgtgaggtagaagtcaggcacaggctaaccagacatggacttgggcagtgcagggggaaacaacccagccctcatcaagcatcacgcttggcttggccagctctgtttggggtggaatgtgcgtgataagcgaattcacatggagatctaaatgactgccaagggtcatttgcatttctaaccaaagggatacataattaatggtagctcttgagacatcaaactgacatatcgactgtgggcctgttttgccagaacagcggaaaggctggggcacccgtctgctgggaagactccatgtaacagggttaaaaaggtaaagtttcagaggactttctgatccatgaagttagtggtgcatgtgtctgttcagggactcctcatctaaagcatttacagacatattagcaagattaggtgactccaaagggctgtgaggaggactgagtacagtgaggccaaattcagtcctgaaacctaacatctgccagtgcatctgagtgggtgcccagtgggtggcctcactcactagctgggccaggcagcgggatggctgccttttgtgtgcagaggcccatgggggctgtctgttggttgtgattttcctggctttagcgctatacgtttgaatcactgcagtattgtacaacccacccaggggcggggtggggggtgcatttctggagggccctctatgcacctgttagtattgcaagtacgggtccaaagagacgcagcttggaagaagcacacgttctgtggtgcccctgtctacagcaggcttctctgcgcgaagttgttttagccctctgttctgcaagttacagcatcttgaatgaggcaaagtgacacacgggcaaatggtgtgtattccctacaaactcctcagagttgacaccgctctcgcctttcttcttgcattgccagaggctgtgactctggctcttcactcttcagtcatcacaaagccttttccctttatcatgtcagaccttggaaaacccacagtcatgaaaatgatttatcttcctaaattgtcagtgatctcccattaggcttaggataaaatccaatttcttcccaggcctccaagggcttgtgtgatctcacctctgcctgcctgtctccgttcaagcccgtccatctctctctccagcttcccatgctccagacacgctgacctgtcctccttctgcccctcaagcaggacacacctgctcccaccctgggcctgtgcacatgctgtgctgtcccctctccctgagcggctcccctcggatcttttgtgactgctgctgtctcatctggtgtctcccagatgttaacttcccagagagaccaccactgacgttcctgtcacaaggacacccgtcttccctgcccacctgtgactttgttttagcttcttcacagcaattgttattatgggaaattgtcttatttattgtttaatgtctgtacagtggactaggatgtcggctctaagacaaaaatgtcctctcagacttggtattttaaaatgtgtttcaaatttacaattgtaataaatgggtaacataataaataataaattgtatattaggtccctggactgctgttgaatgaatgaatggcaacaatgataggagtagttgctgtttattgagtacctgttatgtgtcaggctccacatttaatcatcacaccaaacccaagtgaccagtgctgtcaacctcactttacatataaaaacatattaaaaaaaaccaagattcacaaatgttacatgattttcacttttgtaataggcgtaacagcctggattcaagcccaggtctgactggttcagaaacccatgccctttctctaaagaagaagtaggtaacttgctatgtcatccactatctggtggttttccctgctggctggttttccctttctctcccactctgcacccacgcagctccaggcatggatgccagtccattcagatttctcctatgtctgtcctgtgttagtctacttgggctgccatgacaaagtattgcagactgggtggcttcaacaccggaagtttattttctcacggtcctggaggctggaagtctgagccaaggtactgggaggattggtgaggcctctctcctgggcttgcacacagctaccttcttgctgtgtcctcacatggcctttcctctgcacgcatgccgggagagagacggctggcgtctcttcttataaggacaccagtcctatcagatttgagccctgccctcctgacctcattttacgttaattacctccttgagaattctaactccaaatatagtaacactggggttaggattttaacatgaatgtggggtaggggggactcgggggtggcaggggcacaattcagtcccttacacattctgtggaaacactttttccgatgccttaattatacccaactgattaaaatacaaaagtaatattaacagttcccaatcagtgcttgagggctagaaaacattgaaatatgtgatccctgcccccgaggcacttagcgtttcaaatctcggactcattgagttgtgtgctttattaatgataattggggcttttagaatgaatgctggatgcccgtgttgaagcccctcagccctgaagggccactggggcagacacatgctaagaacgtgtcaattggataatcaattagcttaatttaaaaagtggcagccactgagataggaaatgtgaaagatgctactgaaaattgtttagtctgcaagtcacatcagagagatgtctgcatcagcattatatcatgatttggcctccagaatttaggcagaatgtgagaaagctggagaaggtccagaaataaacaacaggatgaattaagggagagaaaataatgctatgagaaaaggtgataagagttgcattttttattttttaaatcccaatgcccaagagattgtggcacataggtaattactatcttctagggtcgttaaaggaagaatgctgaccaactgtttaatattttcttgggaaatttaataggagtcatgggctcaagtccagcataagagaagtggagggggcaaagaagcaatcattttgatttttagtgtgattaaatgctgaattaattcccagcaagggaattgcactatcggtggtcctgtcttgacagctatttgtctggaatggttcatgtgcatagactcaagcctctcccacctggtagaattcttgctcctcatagataattttccccacagctatatgtcactgtggggaactctgagggcctggggatctatacccttattctgctttgcacagtgtctcctgaagtttccacatctttggcacttagagagctttacatcatctaattctgccttctggcatctcttctcaattgcatcacagtgctcttgggacaaccctgcagtttataaatccatctacctggaggcaggagatcaaatcagatgacctgtgaagcccctttgtggtgaaaacatctagcggctttcttacttagaaattaaagatgggtgcagtgtcatggctgctcactctgcctctccatgagaggaaactaaataaaaattctcacaagacattaatagccaaataaagagttaatagggttcgtctctgggagttaatttagaaagagttgataggataatgggcaataaaatagaaaaggaaataatgtttattgagaatcatttcttctgttaaaatgtattaggttcacaaaggagttgctattttggaatcattcatttgatgattcctcaaagatttctgagagccaactagatgccaggcactctccccggtgctgaagatagggtggcaggcagtacaaagctcctgccttggtgagcttgcaagtcctcatgaattaggatttccaactgcaagtgacaaaaatgcaacccaaagtgctttaagccaggagaaaaggatctgtaactgggaagactagtgatcactggttccatattattgctggattggattcagggctcagcagggaagcaagtgacagcctgcccgactgctcagctgaatctctgaggtttcctcttgctggaccagcttgggtcctgggaccatccctgaacaccagttatatagagaaggaaagactgctgtacctaaggttaagtggagacatgttttccccctgctgctggggatggggggtcagcttcaccctaagagtggggctggggtcattttgctaaagcaagctcaggacatgcttgccctaggaaggaacagtgaatgcttgatgaaaaaaaaatttctttaaggtagttactttttaaagtttttaaacaaacttcagaaagtttaatccacacagggacttcgaacccacatctttccttacatggtgcttcttcaggaagcagcaggagaaatatttgcctagtccccgctgccagaaccaccttcttcctccacatcagcttttccagtgattcagacccacccctccatcccatcagaacccatctagcccacacctccttctcagtgcctagctttgtgctgccccaaatgctacatcattctatattatgcacagtgagaaatatatgtatgcagaatacacacacatacctgtgtctggatgatatatgtgacttttcataaaagcaaccctgctcttaaaaaccccttctgtgaacactctccaccctcccctgccttctgacagatctcaggcaaagattacacttgctgacagcaggaacccaccagccccctaatttcacacttagcaccttgccattggaagaatgcaccattttttcttcctgaagtgctacactccagggcaggtcctttgtgtcctatgaaagtgctgtccatcactggctgcttctcctctggcccctcccacccccaccccaacgccaaatatctctgggggcagccctggggttcccatcttggtgctccccacagccctccgtggtgtgctctggatggttgagtggaatggctttctcgagatgaagagaagaggcctgcagcatggaagggaaggagtgggcacagggccgtctctactgctcactgcacctcctccagtgtcctgtgacaaattctgagagctctccacccatccactccacaccttcttccccaaacctgtggttttaagtacataagcaatgcagccacattgcaaaacaagaaaatgagggaaggagaagggagggtcctgagaaaggagaagaaaagaggaaaaaaagcagaagaaaaattgagaaaagaaatacggaaacccacctgcaattgccacctgcaggttcttttcatgtgcatctgttttatgttgttactctttcaatacagagttgcccacggtctactctagctacttgtttatcccaagtaatttcatgtaaaaaatttaccctcaatcttctgtagctcgccttgctagggtgacacctacatctcctgcctaagtattgtcattagacccaaaatgaaatgcatgtgacttgcagggtcaaaggctcagtgcccttgctctccgattagaagatcttaggatgacttattttgatttcttgttcctgattgtgcctcttagggcagaaatggttcttgctaaacaacaaaattctctataaaaggcatcttgctggggaaggagggataatacctggttggaaaagtacaggtagttattgcatgaaaaataccaaaggggcccaggcaccatcattactgctattgcccttctcggaaaggctgacgtgttgaaatcaactgtggccatcccggctttcctttatgttgctgctttggagcgagcagacagaaagaagcgtgcacgttggtgattggcggcatgacagcctcaaggcactaacccagcacctgcttcctgaggccagctcagcacctcacaaggtgccaggtgctgggataggaacagaagggacttggtccctgtctgagaggtgttcatctgggaggaagccagccatatgtgtgacttctagtgcccaattagtcagtgtacatccagaaagcaggggcgcattccagcttatagaagagaagccctggggtggaaatgtgttgtgtgtttttacaacagtcagaacaaatggtggcctttggaaagtaccatgagcaatgttagattataaggacaagcaatggaatgttaagggtcagaggcaggaggggaccccctccttgcatggagcaccttgtactctgcctgacaagtgagcctcaaaacagagagcttggttttacaaaagttttttcttcccttcaggtctcatacttttatttgtaaagtggtgctaataatagtctttcttctttcactggattgatgaaagactcaagtactaaccacatacaaagattattgttaatttaatgcattccatggggggtcagggaataaatatcctttgtaatttggttttaagaacgattttaaatttttcccccaattacaaaatggataaatttgcattgtagccaatttggaaatatagcaaagcacataaaaatatttttaaattatcatccagacattaaaaaccattaccattggcatgtatctcccaaccaagctttttcctatgcacgggttaagaaaaacaagcattcagcatctctgttcttatatccttgtccatatactcctaattttgtccttaacatagagtctagtagtaaaattgttggagtgtagagcagaatatatgcagagtttcagatctttagaactatagtgtcaaactgccattttgaaaggttattcaattcacatcccagaaattgaagataatgctgcccccttccccacctgtcctttgctgggtgctaacatttctaaacatctttactaatttgatagtataaaaatggtacttcattgttttaattagcctttctttgattattggtgatgaacatttttttcatgtgtttattcaccagttgtattgatttctctgtagtttgactactccttgtcttttttctattgatgtatttcttcttattattgatttgtaaaataacacttttatatattaaagacattgacttttcagcaaacattttgcaagtattttcccaatttgtcgtttgtcttttgtttatggtaggcctgataaacagaaggtttgtaatgtttatttagtcaaaaatgtttaacttttttcctttatggtatcagcattcgtttatatgcatataaagtgctttccaatttggcatggttaattttgtatgtccacttggctaggccatagtgcctaaatatttggtcagacattattctagatatttctgtgaagatacttttcagatgagattgacgtttaaattactagactttgagtaaagcagattaccctccataatgtgggtggacctcacccagtcagtggaaggtcttagtagaaaaaagacttagctcccgcaaagaagagataattctgccagtagactgctttggacttgaatggtaacatcagctcttttctgggacttcagcctgccagcctaccctgcagattttggacttgagtggtaacatcaactcttttctgggactttagcctgccagcctaccctgcagattttggacttgccagcctctgtaatcacatgagccaattccttaaaaaagatctatttctccctctctctcaatcaccctacacacacacacacacacacacacacacaattagttctatttctctatagaactctaataatatacagccaaaaattatgtaaatgtttatttatattttcttttagtattattatgctttcagtttgtgtgtgtgtgtgtgtgtgtgtgtgtgtgtgtgtgtggtgtgtgtgtgtgtgcatatatatatatatatttttttttttttttttttttttttttgagatggagtctcactctgtcgcccaggctggaatgcatgggtatgatctcggcttaatgcaacctccacctcccaggctcaagcaattcttctgcctcagcctcctgagtagctgggaatataggcacctgccactatgctcagctaatttttgtatttttagtagagaacaggtttcaccatgttggccaggctggtctcaaactcctgacctcaggtgatccacccaccttggcctcccaaagtgctgggattacagacatgtgccactgaccctggccagtttgtacattttttagtcggttgagagttcaatgtttgctataaggccgatttttttttttttgagacagggtctcactctatctcccaggctggagtgcagtggtgcaatcatggcttactgtagcctcgaattcctgggaccaaagatcctcttgcctcagtctcccaaagtgctgggattataggagcccagcctcaaggcagagaggcagagatttgatttaattatcttccatgtggttaactaattgttccaacaccataaattaaatgacatatcctttctttttttccttgaaatgacaccctatttacatgtatcttcctagatttttagtctgttgttttgatctgcctgttcctgctgccataccccattgttttggtaaccttagttttacaatgcactttaatgttagagaagtcaacacctcagactgccttttctgaatctttttttagaaatgttttccacatgagtgaatttgaataatttttgttatgttcccaaaagaaatcccattcacaatttattggaattgtgttactgttataggggaatatggagaaaatttaaatctttacaatcctgaattttcctattcagggacacagagtctctccgtttactcaaccctcctatttttctcaataaatttctgtcattttcttcataggtgttttgcacattttatagacattttatatttttggttgcttttggattttttgtcattataattttctggttttgtgtatgtgtttgtattaatttatattgtaaacagtgccttactaaatctcttacaaattctaatagtaattttgtgaactgtagatttttttccagaaaatatgataattttctcctcttcttttcaatgttttttgactattatcttgtattcttgtctaactgcagggtctagaccttccaggaaacaaagtcttagtacatagtacgtgagcttctttgtcttaattctaaaagtaaaaggattgctcctaagtggttcattaaaatgatattggtaaattatcactgaactcttagaataagtcctccttggtcatggcacgttagtctttcaaaaaaaaaatagcgctaggtttgatttggtattctttacttaaggtttttatttatttatttttgcattacttttcatgagctgtagattttagtttttacatttcatttctcatatggtggctgatgcactttgaaaatgagttaagaaactcaattttttcaatatacggaattgttgaatattgtttgccctcctaagtactttgatgttattaccaaccttgcttttttgtcatttggtttttctgacattcactttgccaacaaatatttcttgagtgcatactatgttctaaatactaatttttactggtttatcatttaatctatattttttgtatgttttgcttttttttaaaaaaaaaaagcaggtgatatttgttgagccaatctgagaattatttatgttatcacaggaagatttaacctatttatagttattataatatgtgttatgatcagaattgcttcttgcagcttattttgttttctgaatttatgctttctttttctttgtttcctgtattgtactctataaactgttgttattttattatcatctctcagtgcctcatatattccctaatcttaaatctcccataggttacctttaaaaattttggaagtttttttttttttcctttccttttaagagatggggttctcactttgttgctcaggctggagtgcagtggtgtgatcatggctcattccagccctgacctcctgacctcaagtgatcctcccacctcagcctcccaaagtgctggcattacaggtgtgagccaccatgcctagccctgtaccacttcttagtttctattattattaggaatttggagccaaccaatgaaagactttttgttagtcttttctttctaaaacatgctgacaatttattcagcttattaaccaacattatagcatttatttagatttatctgttatttatttggttgcatggcttatcggggattcttctatattatagtttcagatgttaattttcttttcttaggttaattatattaatgttacattttcaagcgatgtttttgaatgaagaatgcatgggtgttatattgtcttgaatactgcatgtccaagaatacaaagtattacttttatatagtaaagacgagcttccttattatacttcctaaataaaagtactttcccttacaactatgtagacattggtccattatcttccagtattttgtattccagaataaaagtctaagggaggcctggtttgtttcctttgtttaaaaaataaattgttttgtggttttctggctaaaatgctagaaccacttgtcctttgtcttcattatccaaatgtttatttgggtaagtgtagtatcgatttcttaccattttttcttctggaacatgatgaatgcttttaatctatgcttcagtctttaggaacatttcccacaactatgtctttgtcttgattatttgttctagccttgtcttctgaaattgtctgtgtgtagtggaaactctattgcctgccctgcacatctgctccttttcttctctgcactctgggacagcttctaaagtttgtccaacatgtcattgactgagttttgtatcatttcagttctgctctttactggttcctatgtggatgctaattatgcaaatgcattttccacctcttgcactcctttttctaagtcacctcacttctcatttcctcatgtttttcctttatcctcttctctcgagcctttgattcaccctcttgtttcttcatctgttcctcttctctagagattcctcctgttctccctgaaccaacggtttattattattattattattattattattattattattattattatcattgagacggagtcttgctctttagctcaggctggaacgcagtggctcgatctcggctcattgcaagctccgcttcccggattcacgccattctcctgcctcagcctctcgagtagctgggactacaggcgcccaccactacgcctggctaatttttttgtatttttagtagagacggggtttcaccgtgttagccaggatggtctcgatctcctgacctcgtgatccaccggccttggcctcccaaagttctgggattacaggcatgagccaccgcgcccggccccgacagtttatttaattctcttgaggtgccgaagttctcttacgttttcttctgaattctaaagtagatcattctcagagaggacccttcaggataatgttctgtttgtcgcaatgtacagattctactcccacctctatccccactcctttgtaccaggcctcatgttgggtttaaatctcgtgtacttaccactgaaaaagaagtgatccattcccagtcactgctgaccaatagtcaggatgtttagaagcctttgtccttgccgtctgtccatgtggatggctgaagacaggtttaatagcatccaattccatagaattggaattggaagaattctataggaagaatccacttcatgcagttcctcttccagccccactggctgctgctctgccctgctgaacacatggatgggcacaggacacactgcagttcatagtgtatactgctgctggggtctctgctcttacccactgtgtcggtgtgaatttcatgtattcctgcttgtcctagtggtaaccattcttctctgtgaccaaagaatacaattcaacgtttctcctcatatagcaattaataatatgcatatttgtaaaaagaaacaattctgccctattggaacatatatgatgtgaatataagtataccaagatattccatgcttatagtttggagttaggcgtcatcaaagcaaaatgcctgttacagaagaggattagcaaaggcgcagctctctggaggaggtctgtgagatactagaaaatcttatccaggccgggcacagtggctcatgcctgtaatcccagcacattgggaggctgaggcgggctgatcatttgaggtcaggagttcacgaccagcctggccaacatggggaaaccccatctctactaaaagtaatataaaaattagccaggcatggtagctcatgcctgtagtcccagctactcaagaggctaaggcatgagaatcgcttgaacctggaaagtggaggttgcagtgagccaagatcacgccactgcactccagcctgggcgagagagagcaaaactgtctcaaaaaaaaaaaggaagaaaatcttatccagtctctgggcatcacctttccacccagtcctacctccctgttggcaactaaggctactgcagcatcatatgcataagccattgctcttccttctgagtgtacaggtatctgggtatatacatatgtgtgaaggtacacatttatcttattacagaatatactacataatttatgatgcagagtgaaaagagattgaaaaacacattcaagtgcctaaaatactgcttgggatatgtagcagtataattgaaggacatgtactataaaagtctaatgtgtaaaattctttaaagaattacccacattattctatgtcaaatctcttgttaaaaaacaaactggaaaaattcactggacagtagctgattttcaactccaaatctccaatctatttgagatccaagccctctaagtaagatcacagatcatagttgtttgctcactgtgtcatttgggaatctgcagcacctattgagggtcttgaagagaatccagtgagctgtggggagatttgtatgatcagtatcgagtctgaactgtgtgttggactacatgtggcagagagagaggtgggtaggacacaggtgagaagcacggtctgccgcctacagccccagggaaagagtgacgctgtggcgaggcagggtgatgcgtgggctttgggctttggaggagggaggaatggccttgcccagtgtgggcctgcatgcatgtcctgtagaatcttcctcagtgaaggatgtagaaggagggtactgtgggttacatgaggggcaataagggagcaaggaccttgcagaatgctgaacactacaaacatggtggagccatgaaactggaactggtccaaagcatttggctcccaccatgcagctgtggttgctcacccgccactccatcactccaccttgaatgacgctcagctctgtcttcacttctggcccccttctgcctgctccacccaccatggccatgtcagctggctgcatccctgctgccctgtctctttcctctgcctctcagcctctgaatactcctggcttctgcctcctcctaactcagcttggcttggatccctctggttcctggcatacctcattttgaagcttcctccaagtctcacttttattggggcaaactgattaatcacttgaaaaattaatcattttttcagtgtaaattttcaaaaagttctgtccagctggctctgctcacctcttaggatgtgtcacgggagagtctttggagttgcagcctttgggtcacgtgtgccccttgctccagttagacgtggtcacagcaagttgtggggtacaaaatatggctgcctggagctacttattcagttgggtctgcggtcaagacagttttccttagaagaggctgtgggtatggtaaggatcgtggttgacaggattggtatgatgttgctggctactggggaggagaagagggaacagcgcaaatccagaagcctggttctttgtccttaaggtctggctggaaagaagaagagcacatgcaactccatcgctgaatgatcctgagtatctcagggtgctgatcatgtcctaaccagggacccaggcccatggcagaccacttgtgccacagagagatgccagcttaggttgagggacccagaggagcctggcccacagctggtctggctgtgcttggggtgcccttgaaggcatggcctgtggccttgatggaactcagaggggatacatctcatctcaggcccagaaactgagctcgcaaaaactccttgagctggaggtgagagatgaccaagcaagagaaacatcagttgctacaaaatcactgtaagaatggcttctgaaacaggggccagcccgagagctatacagaaaccctttttgagcgagagctggctttcatgtccccatctcacagatgggttttgacgtcagaggagagaaccagcggaaaccttatcgagtgggacacggctgtggctctagccttgcgctcagatccattttgctgactcaccggtagaggcagaggacaggatcgcaaagctcctgtcttccagaaaggactccctggggctccatgaagagagcgctctcagtaacatttacactacattttgttcctgtttgcctttaaaatgttttgttttcccccagttctcttggagtgggagataaaatctgggtagggagctaagtttgtggtttctccttctgctggaaaaattgatcttcctgaaagcttgcatggtctgttctcagggaaggctgggaacattgttgggtaggtccagtagcaaactccagactcataaatgaatcgtggagagctgacaggaaggtaccacctggacaacatgagctttagcccaacctgggaatatccatgcacagtccttggggtttgaaaggtaattttttatatagaaataagcaggagctcatttaacttaccacatggtcttttgggggtcagtggatttgttaatatatgatgccaacaaggtgttttgcccagaaccactgtgtagagggtgttgctgtgggctgttgtctattgtttcacagcattgagggtaaggcaacgaggttccattgtctggccatgccacttaactctgtgaccttagacaaattagttaatcacactatgcctcagttctttcaactgtaaaatggggataatgctggtgccttcctcatagggttattctgaggattaaaggatataacgtactaaataccttggcacagggcctagcatacagtgggcactaaatcattggttatgattatgaagtatgagtgagtggaccagatcttttgcctacactccatatcggaaaccagatgtttgtccctagagctctgtggtcagtgaacacgtgcatgacttctgaggttcctgccaaggttcagagcaagcatttcagggtcaaggctctgggtcagtgggcactgcccagggcagcaggagagacagagctgtcacactgcctgcccagcttcatggctgtctttgtatctgttctcctttcctggttgcttacatatgttatcgtgttaggcccattatccataatgaaacattcagagtgtttagcaacccagaagctattgcagtccttcgctgaaggactctgttgttatgaaatgaatcatttccaggagaaaacaagtgaaagctccaacagccatactcctgggctgagagcaataaccatttaaatagcgagagtgaacactcattggtctcaaccccttaaaaggttttcttgggataaattggtgcttgctgagtgatttgcttctctgtgagggtattctgggtgctggctgaaatgagcaaggaggaggcaggccctggaccacaaaggctcctctctgataaagaatcagaagaggaaattagaaaagcaaaaatctggacaggccatgaaaaagaggagacggagaaggttggccaggtctttgctgtgttgtaaaaaagaggaggtttctgtctcttgagaatccagagcccagaggagatgaggtgtgggggttgcagctctgtagccagggcaaaactgcaggagaagggctcacccagtgtagcagggcagctctgctgtggtctgaaggaggcttaaacacagggatgggaaagtgatggggtggctggaataggcctgcattttgaaaatcaaaactagatttatttcctttcatttgttgtactgctgtggttactcagaaaccagcaactatgtcaggttcctggtttacagagtaaaccaatagcaagtcctttaatgtgcttctagaggtatgctttccttccttgagaaacaaggaaggattacaagattaacacttaccttatatatgagtaagatgattaacaagatcagcacttaccttatataagagtaagatgaaaggcccaacaagacagactctaaggagcatgtaaaatatcaagccttgcttaaacaggatctgggcaaaatacatcctagcagtttgcattaaacagattatactgttaatgctattttaaagctatttgcttctcactcatgtggtttcaggacttccacagatactaaaatcctcagatgctcaagtcccttctacaaagtggtgtcgtttttgcatataacctacacacgttcttccatacactttaaatgatctctggattacttagtcatgtgctgcataatgatgtttcagttgacaacagaccgcatgtacagtggaagtcctgtacgattacactgaacctgaaaaattcctgtcacatagtgatgtcatagctgtcatcacatcacagcataatccttattcacgtgtttgtggcaatgctggtgtaaacaaacctactgcaaaatatgctggggagtacttagcttatccatagttgaccctcccaaaggtagctcagaccttcaagatagaaagccaagcatttgacacatgagacctgacctcaaaggaaagggctattttagaatccttgcaatttaagatgattcccacccatccccatggcagaataatagttaataacagttagctaacattcactgcatgcttgctgagtgccaggcaccaatcctacctgcaatttaattttcatcactttgagggggtggtgctattctaatccccatttaacagatgaggaaagtgaggtgcaaagagacttagtaacataattagagggcccacactcatgcaaccagggaccagtgtagctaaaagaaaaattcattgctgttccctttcataatacaattttgcacaatgatgacatccggcaaaatacccaatgatgcatttctcagaacagatcccatcattaagcaatctgtgactgtaatacctcacacagtgtgctgtataaatagttgttatactgtatttttaaaaaattctactttttatggttatgttattttttattttattttattattattatttttttaatgctttcagccaggcgcagtggctcatgcctgtaaccccagcactttaggaggccgaggagggcggatcatgaggtcaggatattgagaccatcctggccaacatagcgaaaccccatctctactaaaaatacaaaaattagccgggcatggtgtcgggcgcctgtaatcccagctacttgggaggctgaggcaggagagtctcttgaacccaggaggtggaggttgcagtgagctgagatcatgccactgcactccagcctggcgacagagcgagactcagtatcaaaaaaaaaaaaaaaaaatgctttcaagtctccgttgtttgaatctgtagatgtggaacccgcagatccagagggccgactgtacgtagttactttcaaaaaagagcagtagactctggaaatggcgaaggtagtttctgagctagttccaaagcatctttctgatccgtctgcagaaaggacccaaggggctcaaacactttcagcctgcttggggagattatcaagagctggtacagcatgctgcattgttctgttcatttttatttaaaaaattaaactaaactaatatttatattgcctgctttttattttattttatttattttattttttgagacagagtctcactgtcacccaggctgaagggcagtggcgtgatctcggctcactgcaatctctgcctcctgggttcaagcgattctcctgccttagcctcccaagcagctgggattacaggcatgtgccaccatgcccagcgaatttttgtagttttagtagagatggggttttgccatgttggccaggctggtctggaactcctgacctcaggtaatccaccttggcctcccaaagtggtaggattacaggcctgagccaccgcgcctggcctattgcctgctttttaaaggcccagtctaatttatttcaggtgaatctttcagaaatacgtgctgtttgttaattcattcagccagccagtcattcctccaacaaatatttatccaacaaatatttattgaatgacctcacttttgccaggcactgatctgagcactgagagccaagatggatgcttagacaactttgttttcaacctaattctcacttttgtttgtgccctgccttaaccctcaaattcatgaaatactttgtgtcacatctgctctcataacaatgctgggcaaattattcccccgttacagaggtgagcaaatggagcttaagactgtgtagcggttatatgaaccatatgaataagtggaaaaacccagaatttttattcgtcctgcttgtcttgtctacccacttgagcttccaatctttcttctgtttcctccctgctcatcagaccaaatctgtcccctttctcattcctctcgagtggagctgttgacttttcagagtgacaagttgatagaatcaactcatctgtgtgaatggttgggaagctaataatggcttaatattatcctgctgtgcattcgctgctatcctggcacaaggtcctcagcttgtcaaacaaatcccctgcctttggctccaacggatcctgtgttagctagagttagggaaacacatggactaaaacttcctaacgaggtaagagcatatttctgccatgtcacaaatccctggacaatcaaatgaattgacagtcgttatttttttacaaaacaattaccagcattttctgtaagaggtgggtttgggtgacagctctgatgattttccattcaatgaagacttcctgaaggtgaaggtccttccccagctccaaaagagactcccaccttgccagcattggcaggcagcctacttgcccactgtctgggattctatagttgtctttccttaaataaacctacttgaagaatatattcagaagcaagtaggatgggtatttttgatggggattgagaagaagtgtagttgattggattttatcttgcaactgatttgtttctgccagatgttgatatgtaaccctgatgctgtgattccaggcctcaggagcagtaacgttataaacaaccttccgttgcttcatctgctagtaggaaccttaatttatcacgtaggtgatagagttgcagtttctcatccacttgtgaaaaaattgggcagctgtagggaatgcatcccttcttttaaagaattcattctaaggaataagacagagaatttattccaaaatatcttcatcccagtggaaataaaaatcctgtctaatggctcagaatatctcctgggctttgattaagaaggacttgtaaggatgggcttttcttctcttactgtttgtcttctgggctaatcagactttaggaagagaatcttgtcttcggcacctactggggcaggcaccttctgggacacagacatctgcctgtgaaacctgctgctgccacagatgtgctttgagggtgctcatttattcagtgacttgctgatgactggagaatggagaaggacaggaacctcctctgttctttaacctcagacacaatgcctgttctgctatgtttaaaaataataccttttatagtttttttctggttataaaaacaaaacttgtcctttttagaaaaaattgaatatataaatagagagagagaggaaggcaaaaattacttgtaataccaccacctagaaatagtctttgttattattctgatttatatccagcctattctctgttaatgcatttatgttgtttgtacaaattgaaatcttcctgtacaatctattctatgacctgaggtttttcacttagcactatattttttctttattgttacttaaaaaatatattctgcatctctgcataaagacaacatctgaactgtgaaaatacaacaatgaccagtctcttacaggagtcctgaccctactcgagttcatattcacagggggagagcaggcattaaacaaataattgtaccagtaattatttgattgcaattgtgataagagctatgaaggaaaagaacagagggctgtgggcacctgactagtctggggaaatcaggaaggcttccctgaggaagtggcatgaaggccaagagctggtagctgagtaaaagttatctagaaaaagagagcccaggataggagtgggaggaagacgagagctctgggagctgagaagagccagcatgggttagggagtgaggggatacatgggacaaggtaatgcagtagaggtaggcagtgactaggtcgctcagagtcccagtgaagaatgttgagttgatcctaaaagcagtggtaagcatcaataggttgtaatcagggttgtgacttgatgaggtttatagttttaaaggattattctgttgtaaaaaatggggattatggaggctgagttaggaaactactataataacctagaagagcaacacttgtggtttggaatagtacaatggtaggcataggagaaatagatggattctacctatttttccctatgtttgaggagcgttttgatcagatatggtgacttactggatatggaaagtgaaaaaggagcttcagggatacttcctagattcctgcctttttcacctggacagaggcactaaacactaatacagggagtttcggggggaggaccaggtcttttgggggtaaatgattgatacggtttggctgtgttcccacccaaatctcatcttgaattgtagttcccataatccccacgtgtggtaggagggacccgatgggaagtaattgaatcatgggggcagtttcccccatgatattcttgtgatagtaagttctcacgagatccgatggttttataaggggtttccccctttgctcggctctcattcttctcattcctcccaccattgtgaagaaggacatgttttcttccccttctgccatgatcgtaagttacctgaggcctccccagccctgggaaactatgagtcaattaaacctctttcctttataatttatccagtctctggcagttcttcatagcagtgtgagaatggactaatacaatgatggactctggtttagacgtgttaagttagatgtgccaatgggagaggagagagcacataggctgttggctatgttgggctggaatgcatcacagggaactgggctgaatatggagatttgggagtcatcagcatgtggatggcaaaagaagccataagtggctaaaattgtctggggcaagaaggtagaatctgaagagaagaaggtctaccacagggcctggagagccagagccactgacctctttcatgggaaggtggatgcatttgaggctgagtctccttgtctcttttacaccaagcctgtctgaattccctcaagacaacttcctccatttgctttatgatcccggtggtgtgccggagccagtgcacactggcttatgcgagcttattgttaaatttgcaggaattttgtgagccgcttgtttgatactggccatgttaggagcaatcacacatggaaattgtcaaattctactaatcaaggttttaaatttatttttccctcttcctggagtgctggttgtttaacatttaccatcatatctccgtttctaaccaactcatctttgcttctagtgcaactttgtgggttctttcccttggaatctgggagtaagcatgatctgtgatcatttctatatctctctggaaagtctctaattttgtcgtaaattaccagccctttctgctaatgagcgagtaagcaaatgactttacattgatacagtgaacctcctcagtctctgtataagttttctattgctgctgtaacaaattaccacaaacatagcaacttaacacaaatttattgtcttaaagtttctggagattaggagtcctcatgagggcttaatgaggttctctgcttagggacttacaaagttaaaatcaatcgaaagaattcagtgctgtgtgagagtagaactgagatccttgctgtattaggctactctcacagtgctataaagaaatacctgagactgagtaatttataaagaaaagaggtttaattggctcatggttctgcaggctctacaggaagcatagtggcttctgcttctgaggagaaggaaacttgcagtcatggcagaaggcataggaaaagcaggcacgtctcacatggccagagtgggaggaagagagggagggagaaggtgctacacgcttttaaaacaactggacctcatgataactcactcatttcacatgaacagcactggggagttggtgctaacccattcatgagaactctgcccccatgatccaattgcctcccaccaggccccacctccaacactggggattgcaattccacaggagatttcgtggggacacagatccaaaccatatcacctgctttctttgccgactattagctaggggatgctctctgctcctaaaagtcacctgcattcttcccttcccgtgtggctctccatcttcaaattggcagtggcatgttagatccttgtcaggatttgattccctttgacttctcctctgccaccagccagacaaagctctctgcttgaagggcttgtgtcattctatcagtcctacctggataacctttctgtctttgcatcacccgtgcctgtgttagtctcctagggctgctgtaacaaagtaccacaaaatgggtggcttaaagcattgggaatgacttattctctcacagttctggaggctagtggtctaaaatcaaagtgtcctcagggctgtgctccctccaaagcctctaagaaaggaggccttcctgccccttccagcttctggaagccccaggtgtcccttgccttatggcagcatcattcccatctctgcctctgtcttcacatggtctcttccctgtgtgtctgcgttctcctctctgtggtgtctgtgtccaaacttatcacttcttataaggacagtaatcatgttggattagggcccacaccaatggcctcatctttacttgattatatctgcaaagaccttatttccaaataaagtcctattcacaggcactggaagttaggacttcaacatacctttttgaaggacccaattcaacccataacagtgccatgtaacaaaatagaacataatcacatgaatggtacttcatcatattcattggtcccaggggttacggcatggaatattgggtggtgaggaggcatttttagaattctgcctaccatagtcttcaaaggtgccctttaaataattgtctcatctgctgacttacctaaaaatagatcccatgtcatccatggtgcctccttgaatgacctcagtttatacctgttcctccttcctccagttttgagtattgtctgcctaacaaacaggactttctcatggactgcactgttctccttccagagggacagactcctagaaactcagtgcctgagctgattacgatatttggtacaagacacagtgaaaatgaagaactcttccatccttcaaacatgaccaattttgtgctccaatccccagcaaaggaaagtttgcttttgctttttatttttttttttcttaaaattgtaaggcatataacaaattgctctgcattttctctcacatggttttggttggaagatgtcttcctttccccagccgtctgctgtacctcactctttagcacactcaggctcaggctggagtcatctctatggccaccttgtgatctgccctctcttttcatcttccccagaagcacatttcccaccatgagtgatagccatgttccatctgcaactggctaaaattgcacggcacttagagtctcccttttatctccccttcctccagatgtcaagcaaattcaaaagttaaagcagatgacttttttttttttcatgaagcaaacaggagtcttgtcagtttctgtgctttacaagagtgttgaaaactgaatggcttcccactgtgtgtccagtttgttctcttctgggcaatttcctttggagaatttaattgtgctaaattattatatgatcatctactctatccagaaaggttagaggtagaattagtcataggaaatcttttttggaaataggtttggctattttatcagcttttacattctcaaaggttaatatgttaatcagtttaattttttttgacatgactattttgtaaaatagcctgagagtgcaagcttggaaaattaacaccttcattattttgtgggtatgtgtgttgatttttgtacccccaagatgacatgacacccctagagtcaggaggctgggtcttattgttgccgaggtaaagttccaggcatatctggtctaacaggacccatggaaaccaaagctttgtgttgtggggcattctgtgaagaaaggatgatgaggcgttccttctgaggaaggaattgaaccgataccttagatctcattaccttttgttcaaaggcagagtcaggcagggtgacaggcccaagttcagagttcagtaagcatgagctccagtctcaatgctaagggtcgttggcatacaaaaccagggacaaatcagctaactactttctttgtctgcaaaatgaaagctcagtttctcttccagggacactcaaggatcagatgagttcacagaaatgaaagtgtaaagacttcagggaagaggaggatggtgagccaggcccaggcaataaaaagactcaacgtaagccttcaacttgaaatggggcccaggacatgctcttagaactcctgctctactcctgtagcagagcaaatattgattcaatgctctaagtgtttatgaagcgccctatacatccccagccttttcctggcccatgagaggtgataaaaaggaaatatgcggcatggtttgcagcccgtctggtctagtggtaaagatgagagtgctcagagcgggccattaaatacatattggttgatcgaataaatgaatgtcaagcaaaatatgacatggcaggatttaggctctacctttccaggatctcataataaagctaaaatgtgtactgtcggaggtagagatgggtagagatcattgctgcctcaaggacttcaaagggatgagagagaggcttgggtggcatggccttggcagcatgtcagaggccccaaatccccagcacaggattaatcagttgagcctgtgctcagtcacagaaggaattgaaaatcatgtaagagtgtgcttcactgaagcaaatatgagttgtcactgttatgaacagcacatttcagctgaactgcaacctaggaggttgattcttgggtttggatttggggaagcagttggtaattccaatttgtgcaagctgatactagacgcgccaccctcagagcccggatcacagattcatagatgtctgacttttgcttagatccacactcacacactctgtgtgtgtgtgtgtgtgtgtgtgtgtgtgtgtgtgtgtgtgtgtgtgtattccccttgtgttacttactaggggaatcctaccacatctcccaggcacttccaggacccagtgatgtgtgtagccatgagagggctctgttcaaatggtcagatccctccagagatttgagctaaaccagccatcccaggacattagacagggatggcgtgaaagctgctttgcagatctcctgtgtgtagtttttgaaacatggtcatgagaagaattgttattcactcagtctgcaactgtgtggtcgaactgggcatatatgacttggattcattctgattggtcactgctcatgctatatccgttgttacatatttagaaaattacctgcgagtgcaatgtgtgtgtgtgtgtgtgtgtgtgtgtaatttgttgctgatgaaaacatggtggcctttgggattccaggcattgattcccaagagcctccctgaggacaagggtctgtgtctgttcctactcccatctctagttctgctaaaacagacctcacagaagacaggccccagcaggtgctcaataaaaagtgagtgagttggtgtggattgaatatgtagggaggggagaatatggtcacttatgagaactgaaaagtactctggaaagttggaaagggcttaaaaggcatgatcctttttttttttttggagactgagtctcactctgtcacctaggctggagtgtggtggtgcaatcctggctcactgcaacctccacctcccaggttcaggtgattctcccgcctcagcctcccgaatagctgagattgcaggtgtgtgccaccatgcccagttaattttgtatatttagtagagactgggtttcaccatgttagccaggctgatctcgaactcccagcctctcgtgatctgcctgcctcagcctcccaaagtgctgggattacaggtgtgagacatcatgcctggctgatctattattttttaaaggataactttaaatgtatagacgtatcaataatgtatagatgtatagagtctgtaataataatcctggcttctatccacctctgtgttgcaattcttagtaagcaagaccatgaataatgagtcttggggagaggaaactttctcaaacattatttcactgaagacagagatgagagaatgtgggattagccccaacagcagctctggaagctctaaggagaagagcttggagaggcagtcaccgtgcggtgaggcacctgaggatttatctggaagtctcatttgcacagtacacccactgctccaactcccagtatgtatttattgggggggtgctaaagaatattatgggatagcagaggcttccctctctccagctgcccctcagtgccaccagtgtgtaggctgggtgccatgcatggagacagaccccgcaagtcacagacaagcccagtgcacagagctgggccttcagaaacccttctgaccacttagtatgcgttcagcagaagcaccttctagataaaatctttcatgcgaatttcctttctgtaaaccttcacctaaatctggtctttcttgagagcatctcctacttagaaaacatttttctttttagttgtataaccgtgttctattatgcttgccatttaaagagcaagggggaaaatgtaggcagggcttctctggaagcagcaagttcatgcatctgggtctgaatcatattctaagtttatcagagatggatgtctatgcatcatagactccaatcccccagtgccaggtcagagggtttcagccccagtacccctgtctgcctgcgtgacccccacagattcaggatctgatgtcccagaaagaggcctgatgagtgaggataaggaacaagcctcaggagctgcctgagcttgggctgaaggggatgcagaggcttctcctgcccctcaggcaaacaacagcaaaaatactctcagcagctatggctaccacttactgagcatgcactatgtgttcagcagtgctctatgtatattattctgatttccccaacccctctatgagataggctttattatccatcttcttccatcgggagaggaaactcaaggaaggtgaccatctcaaggtcacacagccacctgagtgacagaaccaggattggaactcagatgtgcctgagcctagagctcagtgacctgctccctccagggaaggctccttcttcatgtggaagtgggggtctcagctaatgctgtggtagacccattgcttcagagctgggcaccgtgggcagtgccagtgaggatgggcccaggggaagagatttctggtttctttgtcagtataagtatgtttatagcacggcacccatgaaggaacagcagaccctgggctgaggtgggcagaggctcttggggagcccaggtacccctaggggacaagtgagggaagaggattggggtagggctggctaagaccagaagatgggcgggaggcagtaagggggagtcagggctttgggcagtccaactggacgtacagggaggacaagagcaagactagctgctgagtgggagagggcgggacagtggcttacgatggcttggtggggaaagactggcagtgcagcctggttgcaagtggtttgagcgtcccttagaacctccctcctgggacagccccagtctcagaatggggcaaaggcaggggaagagcaggccaggatcacctccctcactgtcctcgtgtccgcatttcctatggagcctcccatgacattcatcatggggcatctgcgagggtattgtggccagagataccacgtcagggaatgcaggagcctcctctcctggtcctgggttgattcaaagcctcatgccatgaatgcagatctttgcctacaacacaggtcccagggctccctgattcctttggtgggagggccatgtggccaggtttagtggagaggctaagtcaactgtggtttttttgtcttaaatcttagatgtctgcacacctgccctctgaagggggttagcatgagagagagagagctgagtgtcagaccacggaattgggcagtttcttctcttccaagttaacatcttggaaagcaccctgcatttttatctacaagattgctttctttgtttgtttgactgtttccatacctacagagcatttgctacatctccctgctttattttacagagttgcatacattctacttaaaggaattgggtgtaggtgggcttggatgtcagagcacatgctgtggagtgtagtggcatagtcagaagtgaacgatcggaggatggaatctcaggttatgtgctgcaggtggcattggtccttctgctcccagcgtcagagctgcagcacaacacatctgccctcctctgcctctgaacatcctcaaacccagcaggagccccaaagacccctaagctacccatgctgaggccactgtccctgcgtttatgctcttacttacttcagtggaggaaccccacttgatgtcctcacagcctagtgtctcctgctttaaacataattctaaccaccttgatcatctgatttcatggcctatggacatttagatgcaggaaaggagctctcagagacagattttggtcacagtgcaggggacaggtggccacccaaatgcaaattgcaaaagtggacagaaggccactagtttacacaaggttgcctcaaacctccctctaatttctcgttaggccccggagtggtccccggagcagagcatgggctcatcattgctgttcactgtgatgatcctaacttccccatcaagctccagagacttttcagttctctctttgtagaaggtgtggaagtgtgttataccccagagcaggaactccatccaaaatatttacacttagaataaaacatattttgtcatgtaaaggccttaagctcagttatttggattatcgctcatccccttagagatgtccgcaaatgaaccaattttagagaatgatttgtggcacttacttcttccactgttagaacagctgcctcctgggtgtgcctgccacatcgtgggatccttgctcctttctccagcaatcacagtgagtggcctggagatgagttgcagagtttctctgagctcagagttacccacttatccacccagcccttccccgcagaggcctggtcgagttttggccttgctcattaatagcacgattctcccatctctcatactggctacaatccctcattcccaaccggtgtgtaagtgggctagcatgtgtgtggatccttctcacaaatgtttctggctgctcgtttccccggatggattcctgtcaggatgctatgggacaagacatgagacatcccatccgctttgttgattcaacatggatatgtttgcttttctgcctcagaatggagacagttgtttacagcctcaccagtcaaaatatttactaaacgtaacctacagttccaggattgagaggaaggaaaacacacagttcactttccatgttgataaaaacatttgcataagatgccttaaaatgcaagccggtgcccctctgtgtgccagagggatgtgctcaaggtgagagtctcaggagcggggtttcctcagcacacccgggccacaggccctcttctgttaaatgtcatattgaaataaatgtgcacataaaccaggtcatactcttcaaagggatatcaggatttcacattttctcacatacagtttagccccatggaattcagactaagttgatcaaaacctatgataggaatcccagaaggtcaaaagacgcagttgttgaacattttatcttcaaaaattactgcctctcagtgtattctgtggtggcaggatatccaaaaatgcctgaaaatgtgctttcagcgcaggactccgtttgtgttaatgtctgctggggacattagtaacaacaccagtgattcagtgagctcactcctgtgtgatgctagacttggaaagcttttaaggaaattaaattacacattcatacaacacagtgttgtaaaaaaaaaaaaaaaagatatcacaagtatcatcttaggcaggataacatagtgttaaggccccagtggcaggtaaaagttgcaaaaccatcacacatgaagtcctctatcatcccagattccaggggaagtggaaatctcttccttttcttttttctttctgctgtggtttacatgttattaagcacgcagtaggtgtgtttaacttctctgttcctcagtatccataactgtaaaatggataataatacctacctcacagggctgtcataggaaccagatatcttagtatggctaaagtgcttaaaacagtttctggcacatagtaaatatgctattgtttttacacatgctgaagctctgtaattcactattgggatttctttctcataaccttgtgtagtctgaagcagtgattggctgggggctggtttctgtctcagaagaaaataaatattgaagaaaggggctagaaggttcaatatccggcagaaggacgatctgagttgaccctggacccctccattctcctcaatccaaacatatagaaaataaaatattactggggaaaatgtttatttttctaaatatatgactggacttgaaggttagagaaatttctaggtacaaaaatgaacaaaccactctcaaaggcagtgacgagtgagcaagccaatgtcatggcaccctgaggtttgagggggcagcgtcagacccagcacgggccacctcagggctagtggcaaaggcttttatctccatcccaggacagcaagtgtactttgggcctgcacaatacagaaaggattctacttaaggctgagacctgggaggactgccctctctgtgaaaatggggactaagaaaattttacctaatggtcaaggaatgtggcaagtagcttgtggtctgcctagactttgaaccacattgaatttacactacttacacgttacagaaattctaaacctagaaataaacttaaagataggtcccagatcagtaaaaccactagagctcctagagaaatacatgcaaacccattataaaggacaatctccacaccagaatatacaggatgccgatgggaaaaagaaaatctcaacctacaacataaaattgcagatcataaggaactaatttgccatcgggaagagttaaccccagactcacacactggggttagctccttcagaatcttcacgtaataaaacacaatgtaaaagtaactatttaaaaatctatgtttgaaattattagaataataaaaagaagagaattataaagaaggaattgtaggggaaaaacaagcaaatttggaaaagtagaatttctagaaattaacattatttaaattaataatacaataaatgatttaaaaacatattaggtacagctgaagagagaattgttgaacaggaagatagctctgaaattactcaggaaagagctcagagagacacaaagatagaaaatataaaacagatattaagagaaaatattaagatattgaaatattaagaaatattgttaaaagatattattaagagttttgaagaacaagtagggtagtctataagaaaagcgtagaggaagtgagggagaagaaacactggaaatgataatagctagaccttttccaaaatttttttaaagatataaatgcctagataaaagcagcactccaaatcatgaacagtataaatacaaattatgttacaatgatctgcagaataccaaagataaaaagtgaccaaagaagaaaaaaagattctctgcaaaggaacaatttctaattgcaaacttcattagcaacaatggaagccagaaggcaattgaataatatcttctaaacaatgaggtaaaatagtcaacttagaattctgtttgagagtgaagggcaaagatactctctgataaagatttaagaggttactgaagaggttacataaactcttactgaaagaactaaaggtatatatactttaggaggaaggcaattgaccccagaagaaaataatgtaatacaataattgctagtgagaaagggaataggcaaaaacataggcataattataagtaagtgttgactgaagaaaagcattgataataaaatgactaatttggggtcatttaaaatatgaaacaagagatggtgatgatggtcagtactaaagaattttatgcttcttgtgttatttgagaagatactaggccttaaaaaactttaggcgttaagtcagaatgtatattgaaaatttaagggtaacctgtaaaagaaaagaaatagaatataacctctaacagaagagtctggaaaaaaagagttggataaataacattcagacagctcagtagattgcagttcagtagacagcagagaagtagacaaaatgaagcaaagtaaaggcatcataagtggtaataatatatagcaataaaaataatattaaataaatactcaaattaagttggcaaaaactgaatatatcagtaatatgttttagtggattggatttatctgttagtcaatagcaattttcagattgaatttttaaaatacacggatgtgctatttacaaagatcatgtctaaatataatggcacaaaatttgaaatgaaattaattgaaaatatatgctaacaaatactaaaagaaaaaattaggccaggcgcagtggctcatgcctgtaatcccagcactttgggaggccgaggtgggtggatcacgaggtcaggagattgagaccatcctggttaacatggtgaaaccctgtctctactaaaaaaatacaaaaaaattagccaggcgtggtggcgggcgcctgtagtcccagctactctggaggctgaagcaggagaatggcatgaacctgggaggtggagcttgcagtgagccgagatagttccactgcactccagcctgggcagcagagtgagactccgtctcaaaaaaaaaaaaaaaagaaaaaattgtttgtagtaacattaatatcaaagtattgtttaaggcacaaaagcattattgggtttactgcacagtgacaaaagaaacaattcactgggaacacataataatcataaacctatatgcacttaacacagctcctaaacagacataatgcaaagcctaggaacttatacaataacatcgacaaatttacaatctacaataatgggatattgtgacacatatttttataaaatgatgtcaagcaaacaaaaatttattaaaaacaatttttttttctttccaatttttattttaggttcagaggtacatgtgcaggtttgttatgtgggtaaactgcatgttgcagggttttggtgtacagataattttgtcacccaggtaaacagcatagtaaagatagttgtttttcagtccttacactcctttcatctgaactccaccctcaagtaggctctggtgtctattgttcctttctttgtgtccgtgtatactcaataaaaactggatatttgaaaatgatgactaataagattaatccattcattatatgtaaaactccacacctaatacacattctttgcatgcacaatacaaaaattagccacattcttggccacaaaacaagttttaacaaataccaactaattgataggccatattccttaactaatttgcaccaaaatcataaattaataaaaagcccactacaaacccatacacttggaaacttaaaaacatattttgaaataactcaaggatcagagaataggtcctaactgaaatcgctgaaagtttagaagcaagcaataatgaattcactacatattcaagtatataggatgctgctaaagcaatacttggaggaaaagttatagccttcagtataattttagaaaattagagccagtagttcatctcaaactttaaaaataataaagaaaagagcgtgccttaatagaaaataaagaagcaatagtgaggatcaagaaaatcaaaatctggccccctggaaaaaaaaaaaaaacttttaaaattgtcaaactctgacaagactggcagtaaacgcttatgtgccagagactgttctatgtgaattatgttttaattcactcaaaggtcaaaatgacctaagaagtagatcagtttgttattaatttcaccacacagctactagtactctgtgacacctgaacaaaacacttctattgtaggacattccggcatttttcatggcaccctgcagatttaaaaaaaaaaaaacaatgaggcaaagatgggagacttatgaggaaaatacatgtaaaccagagcaggtaaaattaagtttataaaggcaagaaactgatttgacaaagaggagaatgtcctgtactgagaacctggaatgagatgtttcctggcagtcaaggttagcatagaaacaggtatttcctggcaaaaggaacgagttgtaggagatgatgtcactggttgcagttgtaggagatgatgtcactggtttcaggctggaggctggctttcagggctagaggtaagcctttgatctcactaatgttcatgggcatctgttcaaatgtcagtgataagtgtctccttgtcttttgtcaccacctagggagggcatcagggccctacaggtagagccaaggagctctcttggtcaacatggagtggagaagctggggctattttgggggtgacatactatgtatccattgctcagacagctcagtgtgctgtctatgtgctaaaagggaactttcctccaccagaactggcattggtccctgagcctggctctttgcatgtcttcttaagaatattttgagagtcttagccccaagttctcctgaatgttacaggcgatatctgctagcagaaccttctagatagtacctcaaaggcattctagcatttctcacttgaaaaatggaagcccctgggatagacatgtgacagaaaaaaaagaaaagagaaatggaggccctctgtgctactttaggtggtggcaatggaagtcacttgcatatactgccacatgtgtaggattattacattatttagctgactgagttcttcctcgcctctcatgacacttggccccatcccaacactcagtgcaatgaacatctctgaacaggaaccaggtttctgcagtggactaggccaggcagatgccccacagaaggttagccgagaaacgggttctccagagggtctgccctatcacttcagaggtccagagtttggtatttatcttaagaattttggatgcttctgggcctgattagtagtggcaccccgtgccaggataggacccagaggaaggaggagtcaaccatctaatagcattgattgtgctcatttaacccctgctacctggcccctctcagtacccctaccctctgtccaatggggggttgacaagatggccttttggataggtcctacagcaggagctttggagttttcaggctctgtgaatctctcacgggcagtctccagatgccagagagtaggattagttatctagaggcagtgggaggggtgaggggcatcatggggcccatgagattggggtgagggtggccctctgaagcactcatggctcatttgcagccaacacccccatacccactcccatcccacagaagctcttactactatgttttcattttcctcaagaataaaaattgacaatggtttgggaatttacttccaaatctacatttttaatagcatatttctcatctagagataaacatgatttctaccctacacatgaaaggacatgtcccgtcatcaatctgtgtagatttcttaccataaaaagagagcttggctgggtgcagtggctcacgcctgtaatctcagcactttgggaggccgcggtgggcagatcacttgaggtcaggagttagaaaccagcctggccaacatggcgaaaccacatctctaccaaaatataaaaattagctggatgtggtggtgggtacccgtaattccagctactcaggaggctgagacatgagaatcgcttgaacccagcaggcagaggttgcagtgagcagagattgtgccactgcactccagcctgggcaacagggtgagactccatctcaaaaaaagagagctcgtcgcaaagattatcttagctatcttggcttttcttttttaaaataatcctaaacaatgcaggataattatatcagcaaaaatcaaaattataaaatgccagttaaaaaccatatgtgtatatggtagcagatattcaaattagctccagtcctttaaagcatcagctgttcaggaagaggtctgaattctatttccttcactatctttgtattagtagtgagcacttccctctttgaatgccagttttcccatctgcaaaaggctggtgtttgactggttggtctctttcagacctgatgatctacgcttggttctaaagatggcaaaactgaggcccacaccagtggggagatttgcccaagtgtcctcagcagcagagttagagccagacccggtgtctgcaggattttaagtagctcagagacagtcacgaagtgctcatgctagtccttagctgtggctcagtggagggctggaaatgagctcagtggggcagttgctgggggtggtcagcaccatcctgagatggtgaggtgaacacagtccctggccacacctgtacagggagaagcacctgcatagggagaagctttccatggccaaccctcctttactgagagaggactcgtcatcaactaggcaccgtgctgaaatgtacatcaacttgggagacactggcaacaaccctatggggtacagcttctacatttaataaatgaaagcctgaggctcagaggcaggagctcacctgaggtcacagagattgatgaacagcagaacagttcaccaagacaaggactctgccattgcacatgcagggactttgtgagtgatgctgaacctcagagtggctcatgctccatcatctgcaaggaaagatggtgacagctcagattgcagaaggaagtgaatatcaagcagcaacatacgtcacaggcaccttctctttgctgtgtgtgatcatcctgaacccagtcaccctgggaggagtgcagagccacgtgccaagtgcagggagatgtaagggcatgacttgggcagtgagaccaggagctctgtgtcaggccttccacgtgctcagagaggaaaatgcctacatcagagcgtcctcttgagcaatgtgctcacagggtccttctatgcagttcattggtgtatgggattccagaatcagacccactacccccagatacagctgctggcaagggtaatataagtaagtggcactccatggcaaagctgtgtgctgtaagggtgtgcagttctcagaagccagggtcaggggcctcctgccagtgtcacatgtcaggtgggacccggattctcccctactggctgcataactttgagcaagttatcctctctgggcctcaatttcctcataggtcaaacagggataacactactttgctctgttttgtggcgcttcaatatgtatgtttgtgcctaagaaggtgtggttcaaagttccttctgctccgcccacccaccgccagctcctgctctgggatcactgacccctgtgagaccatcacttcagaccaggagctggggtttggcagggtgaagagggggccgtttctaggtttttgcagtaacacaactgtaaagggtcaccagggttgttttggctttcttagcacaagagatgagagtagcttgtgtcgggtgatggatttttcatagggaaacacgtttttcttcaacttatctcctcaaatgcgctttcagatgtggttgatgattaagctagttttaaagaaaatgaaggacagaacaggagagggaacgcctgctgcaattatgtccctttctcctgttcctcagagaaatcaatcccccctcctctgccgtctctctttctttcttcctctcccccaacctgtctctcccctcctctccctcccgctcttcatcactctccttcagtctctcactgtctctgtgtatctctcttccttgccctctcttggtctctgtttctccccgcccctcgtaccctgtcctcctctttacgtctctctctgatactctcgtagtgtgtctgtgtgtgtcagtctcttgctcccgatctctctctccttccttcccccaatcctgtctctgtctctcaggcgcctctgcccacaccttgcttattctcctccatgagcccgtgtttttaccgatggtcgcatgaaggccacatgttcatgagtgtgagccattctcaccgtgagtgccattcccccaggagctgggcctttgtacttcctgctcccttgggaatatgcccatttaccaatgggaagacaggctccatagtcccgaactggagaaaattgggatttgccacttgaaggagagtttgttttctggaagaagcccactgtgacaagtaatgtgtcagataactgtggatcaggaacaaaacatgtccatgtacagtgggtaagatgctcccaggcactcgaggcaaacctcagcaactcagccctggtcctgtacagtatttgactctttagccagcagctgggctgagttttccagggccagagtgcttgccgaggacccgaacgttgctgcagcctgaaggagtgcctcctgcctgccctgccagcccacttaggaccgcagcttgtttgcagctgcaatggctcctgctatttgcatatttgcttggaatgtgctgattataaatcatttacctctcttaaagtgggtttaaaggacctctgctgagcagcaagtcctggccatgcttccttagcctaatttgagttgctgcatgtactgaaattaaattacttttcactttcaatgttcccaaattcagctgttgccaacacaggctggctgtcctcccaattagcctgaaccagcaaggtctgcctgcatgggaagctgcgccattacctgcccataaagggttccctcctgctttctctgtgagtctccaggcagatattcttcagcatctgctcccaagagctggctgtgaatgtgaactctgcctccttggttgttcagaagcacatgcttaagagaacaaattttcctacagcagcggctgctgaagtgtcctctttgtggccattgaaagaaactcttagaatgtctcatgaaattattttctggacagagaaatggcactacctggggcagacacatttcatttttaaaccaaaatttatggttactgtcaagggtaatattaatgttttaaaatccttgacaaagaaaaaggagaagagctagaaagttctttggctgaagttacccttcaaaccatgcctgaattgagcttgattctgaactgcatggcacctttccctgcagcaataataagaactgttacctaataaatacaaggtgcttacatttagaaagctctgagctgtcacattcacgatctcaactaattctatgacacctatgcaaagtaagaaggaaggaatccccattttacagaaggggaatatgaagccctcacactgacatcggttgcagaagtgtggctacatttcaagtgtcctgaccctgaccgctgacactaggctcttttcactgtgttatgttgttacttaagagacgatagagaccatgttgctgagcagcgtgtagaaagggcttccaccaagtgcagatacagcagtggaggtctagaaagcaggagaaattctctttatgttttggcaaaggcaggatgagaattctaagatgacctgttttaaaccttatagaatagcatatttctctttgacacatgatgattcttgtaaatgtaagagaataaagcttttctctcatgtgggctagtagatatcttctattcttccttcctcctgggctactgaagaaaaccgagatttcttaaatcttggtttaagaaaaccgagtgaagaaaaactctatttcttaaaaagttttatttttataagtagcctctcccagtgtcatcgtcaaagttctgtgtgagaagcctttcaatgaaatgctgcttaaagcttttttcttcctccatttcaatgttctgcaaagagagggctcagagatgatgatggtgccacttgtgcagggccttccgtttgcttcaggagtccatgcctgggagaggaggacattgcccaatttgctgtacagcagagaaggtgccacacccagggagagagaatctatatggacctcctacttaggcagaggtgtatgtggaggaaggtagaaggaagtgaaaggcagccaggtggctggagccaggatgaggagagctggagatttgaggtgggggtagggagagaagagtccagagaaagacagcaggagtggacattctcgcttggaggcctggcaggctgcagggaggagccacagacaggaaagcctttatagccagcacctctgtagtgcagaatgctgggcaaggccttgccctgggtgagagccaaggaggcagcctgggagctgtataacagaactggcagcaggaaaggattttatttcctgctgagcatgttctgcccctacccagaggcccctacctgccctggagacctactgatgtctcccactaccatgtcccgcctgtgccttactgaaacacaaagacttatcatgagaagctccgaagcaccaaaaggaaaaggctggatcatgacctggccttggcctccaggctaaataatgaggcaactctgaagccagtgtcagagggtaaactgtgatgaaagaatagatgataactagcccatccacgggggactggagtgcgcttaaatggtcaggctttaaagagggtccagtcagagccccagccagcttatcctagcccttttattgggatgggtgctaggaatgggcttctgcagtccacacacatgtaggggcatgtacacttgcatccctgaacaaggccggccttctgtcacatgccctttgctgggcatttgtgctatctctgtattagttcattttcttattgctatgaagaaatacccaagactgggcaatttacaaagaaaaagagatttaatggactcttagttccacatggctggggagggctcacagtcatggtgggaggtgaaggaggagcaaaggcacatcttacatggtggcaggcaagagtttgtgcaggggaactgccctttataaaaccatcagatctcatataagtcttattcactatcatgagaacagcatgggaaaaacctgcccccatgattcagttacctcccactgggtccctcccacgacacataggatgatggtagctacaattcaagatgagatttgggtggggacacagccaaaccatatcattctccataggtggctttggtccatgacagcctgcaagttccttttcaatgctcaggcctggctctttggcccagggtagtctggattatcagcaaggggcccaggagtcatcattcccaggaaatgcagagcttccctgtaggcttgctctgaagttccctcctgccaatttgtacagctgagggatctcagagcccctgccctccctgggaggccttgggatccccactctcgtgcataccaacaccttctccttacctgcacaccctgcaagccatgtgctgtggtgagacagcccctgccacctgctcactctcaccatagctggggcccctggcgtctgtttctgctgtggagctgtgaggctgtgctgtgggtggcctggctagttctctggcagggagaagtgcaccatgggcaaggtgaggggtcagcctctgtaagccctacagcattctctggaagcagtccatttctgtgaactcttgagggcctgcaacaaccatggctgagcccagactaacctctgggcagcccctacccttgccagttatgtttcatgggagcctgattatttttaacagattctcctattgtttcagttgcttgtagtaaatgttgctctgcagcattgatgctagggtagtgccagccagaaacctgtgcaatgctcagatctggctctttggcccaggatagtctggattatcagactgggtttatttttcttggcattgcagtctggcttcctgattatctttcaaacacacatttgcatggcatttccttccatactgagcagattccatcaacagtcttgggattccacttttcctttgcaatatggacgtttttgcatcagtttgcattagctgttagtgaaactggcactgcatctgcaggcagacatcgccagaccgcagcacagttcatcttcagatgttttccttttccatgttggtggcagcttcctttgctccttccctccttctcaagataaattccccaaagcttggacccagcactttctgcctattctcatggtttttgttggggtatgaatgccttagatggcacagagaggcattggagatttacagccctttttattatgactgcacttgagctgctgtcccagcagcagacctcttccttttgatgacaggtcaattggtcaattccgggttgctctgttggcttcttcatcagactgtaagctccatgtaggtagggtctatgtctgacttgttcacccttgtgaacccagacagtggtccagagcctggcacatagtgagcactcaataaacatttattgaatgtacaaataaatagaatgttctttcaagctgagcagctgactacctgtgatgagttcccttaaaaaagcttaatagctttttttttttttttttttttgagacagtctcactctgtcacccgggctggagtgcaggggcgcaatcttggctcactgcaacctctgcttcccaggctcaagtgattctcctgcctcagcctctcaagtatctggaactataggtgtgtgccaccatgcccacctaatttttgtatttttagtacagataggtgttttgccatgttggccaggctggtctcaaactcctggcctcaagtgatccacccacctcagcctccccaagtgctgggattacagatgtgaaccaccgtgcctgaccaatgcttgatagctcttgaatgatcagtctcagaaataaaacttgcaatccagattaacgccaaccaagagttaaacatctcaaggccagagagcaacatgctcactgctcatggagtcacatgtactgacctcaggacatccttggtaaacagcgcagtgcacagcccctggcaggctagcttgttagggcttattaggccaacagccacggtcccttccagcctgggttccactggaacccagcgggttactcggaccgctgctatgtcatgggctggcctgccttcctccacacacggggccgtaaatgtgatgtgcggcacctgctgtttggtgtcgggagctgctcttttcttggaagttttgctgaaaggtaggtgaagccttagggagaaatctcatttaaaaatcaagtttccacttcccagagaaacagaagaactatcatccactaaagcatttcttcaggatcatgaagaaggttattcagctggggtggcagcatccggagcagaggtttaaggtctagatgttagattgcaaggggactgcccagaggcctcgctggggagaatacagtggaaaacattgaggcagaggagatcctggctcccaccgcgtccataccagggctctgtcaccctctctccaggagctgggcccacaagtagaaccggcttcacgttgatccaagccaggtataaccaggacaaggagtggctggggttgaatcagagaatgtccccttaggcaaaaccttggtgactttgaaagccatgtgtgctattccagaggtctcttatacccacacctctcaccttcagtgccgcaggatgaccatgaagcactttggtggtattttaagtgcctcggtttctgcgagaaactcaaatagtagtaatggcaaatatttacatatggcttattctgcaccaggtacaggtctcatggtgaaaggttaatattatggtcccgattttgcagatgaggaaacggaggcttacagaggtgaagtaatttgcccaagggcatcaggccagttagtggtggagctgagatttgaacccaggcagtctggctccagcctgtgagtccctccccatctgcctactgcatgcgggggtggtatgaccagcagggtcaacttcgcctggggtccacatctgcctttctcccttgcattcggtgttaggtcctgtcacaaacattgtcccattggatccttatagggagggtagagtgtccccgtcttttctaattttttggagtttttattcaatttattttgtttaagcagataaaagacacattagccacactgctgtgcatttcccaaagaccacaggaaaaaaactcaaaaactcatggcattaacatagtatttcattttctaacagctttattgggatataatttacatgccagaaaactgatccattttatgtacaagtcaatgatttttggtctgtttgcagaattttctaaaattagtttgtcactacaatctaattttagaacattttcatcacctgcaaaagaaacttgatgccgatatccaggcacccccatgcccaccccagccctaggcaacccctaactcactttttgtcactgtactcttgcctcctctgggcatgtctcacatggactcatacacaatgtgtcactttgtttctgactttctccactgggcacagtgttcttgaggttcttccatgttgttgcatgtcttttggttgctgaatcatattccatcacatgtgccacattttgtgcatccgttcatcggctgatgaacatcttggttgcttccactctttggctattgtattaccctctttagatggaaaaagaactgcatcctagagaagtcttacggcctcggtatagacatcatcagtggagtctggctggcccaggccggtgccttctggttgattcactcaaaataggtgtcgaaactgacacctatttactccttttttgtgcccagcactgggctcagccctgggagccctgcagcaagtaagacgcacatggtccccgccttcatgggattgtcatgcaggcaagcagtaagtgagcaaatcaaggcaggtgagtgttaggtagtgatgagtgctgggaaggaaatcaaataagataatgtggagacatataataaggactttagaatttttctgctttttaattttagttaaacttctctcaatttctccccggcagtagacatttctattttacttaaagaattatccaaatacatttcactttacatggaaaatgtgcaaagatttgagaggtgagaaatcatttttatctgtatgctttagggactgagacactgctgtggatggggcggcttctctccatactttgtggggtcagtgaaggactcctcgcttccctctgccacccctgcctaacaaggcaccctcctttccatttagcaatccgggtcatcgcagaggcctcaatagccccaagcagaaactgcactcgtgtgtgtgagcaaattaccccagttatctggccatgtagaaagctacagttttactcttcatgaaaaattaaaatcttgtcctgatctgatgtaaggaaaaggatgaggcaacttggaggaactcagctattgttgatcaggcagatgataaactacacattttcttgactcaggggatcaatggagaatcttagagagaaactcacagaagaaattaagattaaatttgcaagcctgtaatatggggaatgcattctaacaactacagcaaaataaggctctctcctgaaaatgcattatttatccccgcctgttaccacagctacggatgctccttcctgtggtctgaacccgagtgggttatggaagcagtccagagacagacgacttgctcaccaatacagttagaatttcagatgagcagtcaagatatttttaaactgtttgtgtgtatagccacaccataaatcgtgaagatgaaggtagctgagtgagcctaaatccaaatggggccacaatgtgggctttatgcagcatacattttattaagagaaaaaaaatcagggaatcggttatgtggctcattcccacacatttttcattagtaatatcttggaagaacatcaaaagtggttcttggttcaatggggaccttcagtagaagaacataatttgcctcctaatgaaactcactcacacaacgatatgtaccacagtgaaaatcaggaagagatacttgtatggctggcattaatgattggcgtctccctcagatgtcatcgctgtcaaagccacactggccagacaatgggaactttccagtaattgaagcataaagtgacatgaaatgtccccaacaagaggtatgcctcagtacctaagacagagttattaatttaattatttgggcaaatttctgtctgaattctctggaaaattggcacttctcaggaaaagaaaaaaaaacattttttgcagagttttgaagataaagtttgaagaagatgctttcagaaaagttgccgcccaaaccaaataaaatttcagcaggttgttctctaagagaagagaagcagacaaaacattaaagggtcattttccccccgtgtcttcctgagaagagaataacttgagtccattaagagcggggttttgggaatcacacagcactgtttgatatgcaactctggtggccttgggcaagccacatgtgctctccagcctcagtttccttatttgtaaattgggaacatagttaaaccctgtctccataggtttgctaggaggattaaatgagttgtatgaaaatcattgaacacagactagcaggcctaaagtaaatgcccaacataatggtagtctattgaaaagacctaaaaagaatggaatttgttagaatagtagagcaaatgagagagaaaatggctgaactgcttattggttatctgtgagaaatttgactcctttcctttagaaatcagagtagtatttgtataagccaactaagctatctgcagatttgaagaatatattttaagctttttctttttcttttttctttctagatttttactcactaataattattgaatcatttaaacatattttaaaccaaattttaaacctaaatagtaggtaaacatcttcatgtcaatagtattagtttgcttgcttcttaagcaaaatgctgacagcagaataaggctgcaggggcacaaaagtcttcaataagaaaatgatttactgaggacgtactgtgtgccagatgcagccccacccccagatgttgaggcactttgcctaagaggccaaggtcatgggtgtaaactttaggtgggtcagttagattcattctgattggcttgatccttcttcaggtgaagaaggatcccatgaccaccatatatgtatatataaagatggctcaatgagtgtctcactgactcggggtcagtgaggtccactctacagagaaaggacaagctctgacccttgaataggggaattgtagttgggtaaatagggctcagaaggacatgttggacatggacagagatttctcctctatcctgagagaatggacatatgtcagtgaaggtggaaatttgacatctgtgcactttttttctgtgtgagtttaccaaggaggtaagtggctaggctataaaaaattcacagaaccattctccacaacaacttctctctaactagctttcccatcatgcatgaatatttacacctgcttaaaatgctggggattggaggaacaaactttgttctcagtcttaaattttcctgagagctatgaaagcattggtataacaatgtgctgctaaactgagggccttgaccagtgttcatgtcaagcccatgtcagccatgcatgaaaaccaaactgcaatgtggtatacacaagacaaggcggtcgaggggccataagctcgttgcccaagatgtagcactcactagccgcccagttccttcatctttttgtaactgagcttaatggaatttgcctcaagctgaatgacagagcctccaaaggtttggagactgattccatttggtttagctgttcagcaagcctcttatccgggagtgatgatctcatttttgcccgtttttgccccagcagcctctctcttcacacctttctgctggcctcagcacctttctttgcctctgctactttccttttctctcgtcctcctcctttcctgaactttgcttctgctgtgcacccctcacccaccttaccctcctgccaccttctcagagagccccacaagataagccttattcgcccagactcctctggagggtggacattaaaagccagttccaccactcagagctcctagaaggcaggaactctcacacacgcgtgagagcagggtagcagaggtggctcacgaatgcagattcactcacaggcaaattgttgaagtagcggggagggctgattatgcagaccactccaaattcaatctcccagtttatgttatcacaggagctcatgatggaagcaccacccgataattccgacttgcctattacttattctttatctagaggaaataaagagaaacaattaccttggtgtgacattctgccatgtctacaaagccacctgcacctgagactttgccagcagcagaaataacgagttaagtgctaaatatttcatagagaagagagtagcagggctattgaaaataaattcaaaagaccttcatgtattctggtcatatatccctggcataaaacttctccagagataaaatagctttctgacaggagggttgtggcaggggagggggaggcacggtacagggaacagggaaggcagccctggaaaaccctcctggcctccccgttcccacggtcggacgccgcctttgtgaaagcatctttgaaatgattgaggttgaactattactgcagagcccttttcaataatgaattttaaattataaatgacattttggtgtgtgcccttctctcccacctattggtagttaactgggaaaattgatgcggtttttgtcaggacggagcaaattctcgggaacaggagcctgaagcttagttttagttcctaactgagacatgtgacggacgtccagctcccctgcttcccatacttaaatgcctgcccgggccatgtcctggggccagcctgggctgcacacgaggctcacagcctgcttgtgacacatgagctgaggcattcctttttattctctctctgctgaggacagcctttgggaacctaacattaggatgacttcggggccacggaatgacttgggtttccccgcgaacactgtgaggctgagttcccccatgggtgttgggagcaccgggaggaagtgggtgccatcaattaaaattacgggcctcgttcatgagatacttatcagtcaaaactgcaaagcagttgctgtttgtttactgcgtttaaaggaagctgctaagacagaggagagataatttaagagtaatcattggtgagccagtcctttccactgaccctggtgctcggagttttctctcattgcatcaaccatttttggcaattagatgtgctttccttattaatgccagggtagggaagcagaaaatgaaggctcttcctcacaagtagctgcttaatgttgcagtgcctgcctgtaagtcacgaaagccatggagttttgcccatccttgagcacagaatgcctttaatgacagctacagaatagaaccattaacagaaatgagcaaatcctggcattttccactggcctgtgcatttctcagtgcactgatggagctagggacactccttcacgggggctacagatgaaaatgcccagcctgaacctgtgttccggggggtgctgtgctctctagctgggcactggcacttgcagttctcagcaagagcctggccctgtctcccgtttgttcattcttgggcagcatgcgtggaggacatgatgagagagggtgatgcaggggtcaaaaactggggcatggagggattgtgtgaatgtcccattccctggttattaggcaccacctgtatgcaagaggccaccccagatgctgcactccccatgtctcagctccccctgaagatgagcctaaggtggaaagaaaatacagcaggcggagttgaggtgagatttagaatctgttttctttactgtgggttagatcataccatccctgtagcaagatgacatggtttggctgtgtccccacccaaaatctcatcttgagttgtaattcaaattgcaatccccatgtattgggggagggacctcatgggaggtgattagattatgggggcagctcccccatgctgttcttatgatagtgagtgagttcgcacaagatctgatggttttataaggagcttttctcctcttcactctgcactcattgtctctcctgccaccctgtgaagaggtgccttctaccatgattgtaagtttcctgaggcttccctagccatgggaaactgtgagtgaattaaacctctttcctctgtaaattacccagtctcaggtatttcttcacagcagcatgagaacagactaatacctaagatttctctagagattctatctctgttattacacctttcttagagattccaaatgtggaagactcctctattcaagcatatgtaggtaatgtgttgacgcggaggcagaggtctggcctaataacctcttgaccccctaagcagttgggcagccctcaccacacactgcatgtgtggtgctgcagcgtgtgctgatggctgtccaagtggttacggggtcaagcatgactggtcggtgctgatctcagaccatgggagggacacactgcatgcagctaggagccactttgtccagtcacgaccaaagggccaagcattctaccctgtcgctgatactgcagaccagctggttaggagtcaaactgccaagcagctgacatgctttgacgtgtcacctgtacaaaacacaccattgattttttttttcttttcttttcaaatcagagtctctccaatagcatctgaaaactgtagaaacagagcactagattagaacacattggacaggcaaggttatcttctctagagaagaaatcaacagctgcccctactgggaggaaaagtgtctaaagaaacagggaggggaaggcgtgtcagaactggaactaggtgataaaccctgcaggagtcacaatagcctttgctgagaaagcaaggtcatgggcaggagctccccctgccatggcttgtgagtgtgagtccaggcaaggtgaacagtacaagagtcagggcacagtgggactgggagtacaggcaccaaggccattgccctccaacccctgctacacactcagggaccttgggaaaatcacatccctgttcaaaccctggtgtattcatctttcaaggctggggttagacttgatgaccaagatgtccttgccatgtcagcatttggatggtcttctatcatttgtctataagctgattctgaaagttgaagacaaataaatcgcatttacattagtatgactgtgagatgccaatgttggagagtcaaatcatgtcctagtatttcatttagttctctatgcatccagcataccaactctgagccattcagtgaagactcttttctggtatcaggctgaaataaattctccttttttaccctccatcaattgccttccacatatcctcacattttctaggcattcactaatatgatttcttttatcatcagttgtgttttttatggagtcctttcttctggagcctctttttcttattctaatctagaatgttctttttgctcgcactctccttcccaagttatcctgaatttcctttcttggcttgcactttctcttttctggggtacacccttatgttatttcctgagaaagtgtgcacaggagttccactttctattactcacatatttgaaaatgctttcattctgtacttgtacttgattgacagatcggctggatatagaattccaggttgaaattttttcttctaatagtcaagatagtataactgctatataacccccaaatatcagtagtataatacagtttattgtatactcacagcacagcctgctcattcccctgatggagtgcaggagttctctgctccacacggtaattctgaaaccagattccttctatagtgtggcccccaaggtcactatggacaaggatgagagggagatttgaaagaacatggaaaaggcccagcagctcttaactgatccagcccagaggtgacgtatcattctactcacaccctgtatgtgagacctagtggaatggccccctctagagcaagggggatgaaaagtgtagtgttaactgtgtatccaggagagaaaaaccacaccgtcatacttttaaaggcatcatctttaagcaagcagtgtcattggtaaaaagtccaatgctagactgatccttattccttgtgggtgacccatttaatctatctggaagctattaggatcatccctgtgttagtccactgaggctactataacaaaatcgcatagcctgggtagctgataaacaacagaaatttaaaatttcggtggctgagaagtctaacatcaaagcactggccaagtcagagtctggtgagggcccactttctggttcatagatggcacctttcagctgtgtcctcacatggcagaaggggcagaggcctctctggggtctcttttatgagggcaccaatcccatccatgagaattccactctcctgacctaatcacctcccaaaggccccacatcctaataccatcaccttgggggttaagatttcaacatatgagttgagggggacacagcattgggaccagagcaatcccttcatgaaccctttaaggttcatgagagtagaagctgattcactcacttatctccagtttctatgcctggcacaaaacagggcgaggatcagagtgaggcaattgaggtgcgtgcctccaacacaaagacgcggtagttaaaacaaataatattttaatgcaatattttacaaatcaaaattaatgcaaaaaaatccatgatgaacaaaataacattaatgtccttgatgttataaaattttgcaatgatgtgtctgactttgtggttccttttgtgggtccttcagcctaaagacatatatccttcctcaaataaaagcaattataattttcttaagcaacttcctcttctcaggtttctgtctttctaaaaatcttaattgcatgtgagacctcctgtatcaatattttctgttacttttctcttaaagtgtctgttctatatattttattctatattctggaaaattctcttggctttatcatctgatctgagtattgaactttttgtttcaagactcatgtttttatttatttatttttattttattttattttattttattttattttattttattttattttattttatttttgaggcagagtttcactcttgttccccaggctggagtgcagtggtgcaatcttggctcactgcaacctccacctcctgggttcaagcgattctcctgcctcagcctcctgagtagctgtgattacaggcacgcgccactactcttgactaagttttgtatttttagtagagacggggtttcaccatgttggccaggctggtctcaaactcctgaccccaggtgatccgcctgcctcagcgtcccaaaatgctgcgattacaggcgtgagccactgcgcccagcctaagactcatgcttttaattttcaagcacactttcttgctttctgattcctagaagtggcatcttgttgaaaccgactgaggatactagtttgcagtgtttggctttctttgggaattatgcttttacttttagttttcttctgtcacatggattatctctgtttgggttttatttttagtcagctgtcattgtttgttcatctgtttgttttcagctcatctgtggtactgctctgtgtgttttctgttgcgggtctggcaattcttggttgtccactccaatacggaagtaaggacagcacaagggttgactggaagctcttattccagggcagggcctgtcagctggcagtttccactttaggatgagcaggctgggagctgggtgtcacgtgagcagcccctacgcaatgcccttccagagtatggaaggtgctaacacccacaggaaccaccgtggttctctgcgggctgtggattccatttctttaggcaaaaaattcttctgttttttttttctgcataagagagttttccacatatagcgcttcaatttttccccatccttatcttgactgtgcctctgagggaggtgttatttggaggtgggctccctgtacggcggctgcctcttctgcatatgttctgggctgtgggctgtggactgaggtgtcctctgtcctgtgcgccagtgaatgttctggaaatgtacttaaatcccttgctcaccaagggtgcctcttccactatctttactgttgtaatttactcttttaaagacattgtaattgagtctcagcaggcgaaagaaatgcatgtacctaccctgtcattttgaaccctctccttttgtttttaaaatgtttgaaacatctggctttctaatattagtatgtggcattcccagtttaacatgcccaaagcaaagctgttccatcccctctgccaggtccaacactatctgcatctcctccagtcatgctggctgcagggaacagcaccaaaattcacccacttgcttaaagtggaaaactgggtcatctgtcattcatccctttcccaaagccacatctcaatgcagctctggttatgagctcttggactgttctcttctccttgagcagatcttgccaacagagttcctggctccattgcatccctggccaatgcagcccacggtcttcagaattggcggcattgggtctcccagcacacagaggagaatctatcaccttgatcgccattcggcctcttcacaatccggtcctgaggggtctttctaaccttacctccctctgctttcctctggctcctgccctctggccaagtgagaccagcagtcccctctcagacacatcttctgctttcacatgtctgtgcatttgttcagcttgagatgcactgacttctgtgcggtcagtgcaaaagtaattgtggtttttgcaattaagagtaattatacctgcctttcaaatactgcccttcctttagggcctggattaaatgctatttctcaagaaagtttcatgattcctgcacttgtagggaatctctcaccccctccaccctctcagctcttccctcgtgtgtgttattgtgtaacgtataggtcattctgcatgttggttgggtagccgtctgtttcccgcactgagctggaaagtcctggaggtgagcttggtcatagctggcctgcctgtcagaagtcccttggcagaggttgcagcacaggaacaactgggggagtttgcccggtgctgccacactgagtctcaggtctgggacctggaccttaggctggggtgtggcttgctgagcagctgacctgcggcctgaatggtggtgctgctgatacaatgctgacatggctagagggagaaaaggcagtggctccgtggcttgggctcctctgccttagagggcaggtctagtaattctctcagagaaacttcgagtcggccttcataagaaaacagaggaagagatgaagccacagtcaccttcttccattcttaactcaccctaatactgctgatcacctgtcttggaaatgaaccaaaatacagacagccacaaaccacatccagcttatcattcccacccatcctggactgtggcacccagggtctggttctagctcagtgggatggagtcatctgcaaaccaggagagcgatgccctggggcagggacacccacagggcactaagacaagacccacagagcccttgttggtgcccagaggtcctgtgctgggtgggcaggcctccccctgcctgcctcccccagccttccccatggtgggaagtaactatctcttattttcatcttcccagcaagaggagctacaaacaggctaccaagtaagtcacctggtgcctggtacaccttccccttgctgagaggctcctgcctgtgagaggacaggcaaattgctccataaattatgaacctggaatgaatctgccaggcgcctcctgtgtggggttgaggttgttccctaggagtgccccattctgaagacaattactctaattgcttttgttatttcagaaaacaaattaaaccacccgagtgtttcaaggtagaaaaacgtctgcaatgtataagaaacattttaggagtgtttagttcacagccagcagtgtctgagcaaacagccagaaagcagtcaccagggagcacaggctgctcaggaggttgaggcctttatgaggtgagccgtgtgctccatcggggtgggggtgcaagcctctactcctggcttctctgagggaactcctgcccttctctcccccttgcctgcaagacctatggattctgtcttctgcccatcccctccgtcacagccttgactcaggcccaccctctgtgacccagatttctgcagcagcccctgctgaggtcactgtcttcctcccagctgccctcctttcagtcgcagtaggggcggcccaagacacaagtaacacaatcagatcataatttgccacttcttaatggctttgtggcttcctgtaagctaggagacaacgtatcagacaacccttggcatcagggaggggagagccagcctcctcctgcaggcccagccgtgggaaacctggcttctcacaccttcactctgtcatgccactgagcctctgtcccagggaatgcagtggtgtacacatacacactcacacacacacacacacacacacactcacatatactcattctcacacatgctcatatacaccctcatatactcacacactcatatactcacatacacgcatactcccacactcatacactcactctcacacacatacacatatacacacacacacccacatacatattcagacatatatacacacacactcttacactcacacatacacatgcacacatacatacatatactcatacaatcatactctcacatacactcacacatgctcacacactcatacactgtcacatatacattcacactcatacacatacacacacatacagtcactcgtactcacacactcatattctcacacacactctcacacttacacacacacacactcacactgacacacacacactcacactctgaccctagactgctcctcattcctcaggccaggcgtccttccctgtgaagccttccccagcgtgctgggcttaggacttatctcaatttcacactgtcttgcatccatttgtctctctgttgcccttgccagattgtgagcagcctgagagaggcagggccttgccctgttcactttgtactcctgtcatgtggcaaagggtctatttattactcagagggaattcaataaatgttgaccggatacatggtagatgggtggatggatgaactttgaatgaatgagtaaccctgaggattggtaaatgttctttttttttttttttgagacagagtctcgctctttcgcccaggccggactgcagtggcgctatctcggctcactgcaagctccgcctcctgggttcacgccattctcctgcctcagcctcccgagtagctgggactacaggcgcctgccaccgcacccggctaattttttgtatttttagtagagacggggtttcaccgtgttagccagaatggtctcgatctcctgaccccatgatctgcccgcctcggcctcccaaagtgctgggattacaggcttgagccaccgcacctggccggtaagtgttcttgtcccaaggaattcttctacctcaactccactcaaaatgagaaccctggggaagagagagattgatggattggctcatcagggactctgtccccaccctgccccctcctttcccatatggggagcaggatgtggtgagaaacttgctcaagaagtgggtaaacactttgatggcagaggccatgtcccgtttccttccactcacaaccaagtgaggggcacaaattattccttccccctgccccactgcaggaaaatgtacaaatcctaacttaatctctcccataagcactggaagcttgttggcatagggattagaggtctggtctctacgataagctagccacgatgttgagccttcaaccatcgataaaatcacttggaaatccagtatccctgttagagttggtttcagtgcccatgttgcatgctgctttgtcagggtcctcattaagactttcttcctcccaccttagacagcactgaccctctgttcaggctcacacagtcgctgtcacccaggcccacctgcagctgtgctgccactcaccaaagtctgagaggaactgctcccttaccaggacagtgagcactggcccaaccccactgtgctcctccatgtgtgtggggagtggcctccccaccccctgcccagagcaagaactgattctgggtcacccacccaggactagaacccagagctagtctgcctcactcctgaacaaccaccgctcccaccatgggctgggctcagcaccctgcttggggcttcgtggaatatgtggcatgggacctggcctcaggaagcttattctctatttggggggaaagtaacaagataatacaagacagcacagaatcctgttcatatttctgtggcacggtcttacggatgagaggagctcagaggagactaatatgggttaaatcaggtaggaaagactttgagaggccataagaacttgagcctgactttgaagggtgggtaagaaatagaatgggtgctcccaatggagggaacaccaggcaaagaaaggagtgagcatggcatgggcagaggccaggggagaccaatgtggcaacgcctttcagggactagcaaagatagcaggccggactgccctatgtgcaaattaccattcatataaatgactgataccctttactgagaacaaatgaggagagagagagagtaaatacaaagtgactgcatgcatgaatcaattaataaacgaaggtgtcgagcacctgaaggcaggttggaaaataggaaggaccagcaaaggtaggtgggggttggggaagccaagcactgacttcttggggatgtattatagatgtggttgagtagagactgctcctatcagggaaggtcacagaaaggtcccacttaaattactagttgagtccgctatattttgtatgaaatacatacataaaaagtatgaaaacagcctcttcttttgcataacctttgagaatttccccgatcaaatcctgcagctgggtgagcaactccctggctcgactctgtgtggcctccaggtccagggaccaagttttccccaggcttccttgcagcagctttctccctccttcatggctgacctgcacctctcccctccatggggggaaggtaggagtatgagctcagtgctggaagctgctgttctgggagagttgcttgtgccacaggagtcaaatgaacttttccccacgaggccggcccctctgctgatgctgtgtttgtaaaaccagtaaaggttttccttttgtgaaagagagagagagatatcccttgaacaactggaaccttttaagcctgggctatggttttgtttggggtatttggtggtgtgggggtgggactgtctttctcattattaaaccagaaaaacctgcatatggactcagcaatgaagagtgattttgttcttgggaaaatgtagcagccttcaagttagtaacttgggctcttctgggcacctccactgccgcacctggcctggtggatttgcgctcagatagagcaaaggcagggctgggctacagatgtcttgtgcagacggggaggggcggccccaacactgcttagtgtaagtgtcatctcagaagcagagcttctaggtggaacatccaagggcaccttgagacgtgagacggttgatccatcacagttgtgatatgtcagtgagtacacactccaggttcagggactgtcaccttgggaggtgattgagactgaattcaaaacaatgaatcgatactgacatggaagaatagtttggcaagaaggcttggaactgctctgcaccaaatttgtaatgccagtgaagaagccagtccttggcttccccagcctccacctaactttgctggtccttcctattctccagcctgccttcaggtgctcagcaccttcatttagtaattgattcattcatgcagtcacttgtattcgttctctctcctcatttgctctcaggaaaggctatcagtcatctatgccaggatatattaaagtcaaactccttgacacaggatattgtactttaatcttcatagctgtatgaaaaacccagtcctctgattatgtaagaaatttgtcctaggaggttgagaagccaggaaaagatgagggaggagagtgtgctttagggaacagaccatttcccctgccttgctgtctgggtttgcaccccagagaagaaacacaaagcacaggtacaaggggaaaatggatggccagtggtgaagagaaattgctctaacacttggttgaactcaagtccaaatacgacagggacaggtagggatttacagctggtggagtaagggaaaggatggaaaattaccaagagggcttagtttggtgtagggggtggggaacttgattagacttctaggtggaggaagagacacttgattggatatcaagagtggaggatcctggataaattggcttctcaggattctttgctaaaactgggcccagtagaccaaggattaggccctgcaaagcagagggctcaaaaaagcctgactaaaatttgttcaaatctctgtcaccaggtactcataggacagggagtgtctgtgaggcctgacacacagtcactaaggatgctggcgtggccttgggcctgccgtgattgcttgctggtgcttcatgcatagtaaagatggtcaaatccctgagacctagaagagacttcctgcctcgcacggcattcctcagccaggctttggaaggaagatgaagccagactctggttgcttgcgaactccaggagcacaaagtctcccatctctgagaccttggcccaggcgcagctcagaaactgagtgtggtgtcaggtcacctgctctctaggttacagaaagccccaaactggctcaaatagtagggaaaattatttttacacattgccaagtccatgaatagggcaggccccaggctcagaaccatcatcagtatcaagcgccggcttccttccactctatcatccttcgtgggccagcttagccttccagctggaccctgcagagtcactcacagacccacatccaaggaaaaagactatctcttcagaatccttcttagcactcctcacatttcactggccagggtagtctaccggctccttcccgaaccaatcgttgtcatggaagtgggatttcaggagtgtctttgattaatcgttaggagtgaagtggaggctccagagtcaacccctgcatcctccacatgtgctactttgagtccacttgagttgaattgaattctgggccacagagttgagtgttaatgggctgaaagataattaaggtgttttctacatcttggagtgagaacaagagcacgcatgtgccctggcaccaaagggacacagagcttggcatatttcctaggaattctccagggtgtggggagagggaggaccaagctcccaggccctgcccctcaagggctatgagtgccaagcctgtgtgtgagcacctggccagctttctgtttgagaagacatcatctggggggccagaggggacatcggggcatgtcacagaagcagttgtcgtggctctcttgcctcagtgaggacgtggtcttgagatctgtgtctacctttctctccccaatgccccttctttggacagtgtctgtgatggactcaggtgaggtcagatggtttttgaaagcagatggcccccacttgctgcctgagaccattgtttacttctcatatcatggctggcagcagggcctgtgcttggcaggactcttcctctaaacctgcataggcctagagcttgtctcatccttgctgagagccaggaggttctgaggtgtggttgtgagaatgtgtagttattttcttatttaaacatcctaggtctcggtcttttctttttaaatgtgttgggggagtaaagttctcaaatgaagataacttatgagacttattacgcaggctgatcaaatggcatgataaatcatataaatggtataaaatgctttgatatgaatagcagaatagtgaataaggatgaagcatccaacccttctccaaggtcactggagtgaaaaatatcttattgggcgccccagatatgtccagtcagtcagcaacagagcctagcttgtaacttccgtagaatttctttgctaattcggagggtttgtttgtttgtttgtttgtttgtttagggagtaaaaatcaaatttgcattcatcccaggatgtttcaaggacagatttacagcaacaaacattggtgaactaaaactgggagattgcactgtagagttaggatatggaacagaaaaatgtttaaagctccagtaaactacctagaaatgtaattaagtcccttgcaagaggccaaaatgccaaaaatgtgacagtcaccctgttcttgaagaaccacttctggaggtaatcagtctgttatgacaggggaggatggatggaggccccaatattgtgtcgtggattgaaacccatgctagttagggtattgtccctttagattggcaattttaatatcagagccacattgacagatggaatttgagtaagtgatttgtgcaagcagtccacaactcacaagagagttttgctcccagcagtttagcattaggcagtcatctagacctttgaaaacaaaaatgcatttttttccacaggagtattctcctgaatgtggtttgacttctgcactagtgtccaaaactttatttaaccttcaatgttgctaaaaactactttatacatacaattaatatcatggaatccaatgttataagaaaaattgtagcactgaaagggaaattgttcctttattttctcttgcttggcgtaacctgaaggaaacagatttaactgaaagaggatgagaagttagcctcagagcatgcaagagttggaaggcgtttgagccagagctcaattcaagcccttgtttatcaaacgaggaaactgagactcagagaaatttggtgtttggcccaaagtcacacagccagcagtgtgactagcattcaggcctgccctgacccagtgaatactccctgtagaaagtttccaaagagacaatcagatcccctaggtagcgttgggccccactggaaagtcgactttttttcagtttcactataaaacatgccctgttacttcttaaaacggagatgaggcttgcgactattaggcttctctaggaatagagccctggagctcatagacagaaagaaaagaaatgtgtgttcatgcgagaagcaatgataaggtgaaactaactgagctggaaactgcaaaagaccaggagcagaaaatgtgtggtccctgcaaggaggagcggggaccccaaaatcagatggcggacagacagctgcacactaggtggcgctgtcatccccccggtggcttggttgctgcccttggaaagagcactggggaaggtgttaccggtggagggtgtccaggttctcggtgtcttgaacaaagaattggacaaaacgcacaaagcaagaatgaagtaacataagcagagatgtactgaaaatgaaagtacactccacagtgtgggagcgggcctgagcatagggcctgaagggccccgttacagaatttatgggggcttaaataccctctagaggattccattggttacttggtttacaccctatttaaatgaagaggatgaagtaaagttacaaagtcatttactcggcgtacaccctatggggaggatatttcctttcgtagctgaagtgtgaatcagcctcatgtgtttcctgcctccagatcctattttcctacctcaaaggaggaccctgtgtccatgacaggggcagggggagagtgtggcatgattctttgcctagggaaaggggagggtggtgagacacacagctcactagtccagtgtggataagccagagttcatcaaagataacccaaaactcagcgccacagcatttcacttcccaaagcctgagttgacgcttatggtctcctgttctcccatgagagaggtagccttggcccccacagcctctttcctctcctgtgtgaccccattgcctcagactacaaactgctggaggacaaggactgtctgtttggttttgctttgttgttaattctccacagtctcctctgcagatgtttgataatatctgctaattgaatttttaatttactcaactctaaggtagatttttgagagcaaaacaatttttaaaaaaacattattttatattgacacttgaagttctaaataagtgggttttttttaacctggaattaaaaaaatctaatcctcgtcatatttaattgtcctaaatactgagtgactcttggtatgctattaattccacatgcagactcttcatgggtggtggctgatgggggcttccctctccactgctttggaggaagggctgccctgcacggaccccagggtggtggaaagggaaagcactctcggggactgtcggtgggtttgctttgctctttgtttttagcctcagaataaacatatgtgccctttgcttcagcctctcaggcccaaggaaatggggaaaaacagtggaatctctgcagtttctggaagactgctggctgaaagcttcccgagagccttcagccccacacatgccctcctgcttccagaggcaggtggggtctgttggaggtgggggcagtgacaccatacctctaaggcagaggtctgagccatccatcagcaccagcctgactttcagaggccatgggagctggggtgtctaatgtccgctgcgcctctcctccgtccccgtctacaacaggtgtgtgtgcaccctaccccctgctgctccagagctcctggaggatgtgatggggccttcacaggaggctgtccaagccaacgcttgaaacaatctaaaaggttgcaggttttacagcactcaatccttccctcctcctctcccaccttgtgtttggtgataatactcccacagacaacagtgatgccagtgcttgtgtctgtgaggccctggtaactggaaaacagttgcccatcatctgggggcattcccatgaggccaggccatccccagtccacagatgggacccaggcccagagaggacatgtggcttgccagatgcagaaggacggggattccaaccccagggcacctctctggcattcccattaaggaagcctattctctcctcatgaaatacatgggatgagatgctgccttggccaatgccagacctaacttcaatttgggatgaagacagagaacggggaggaaggaggctcactacccaaggaggtgagctgatggcatccctgtttcttcctgggcatacacagctgggattgtaaaacccaaggcagatatttcaaggctgccattaccattttctgaaggacaaaatcattcttttttattaatacataaataacttttttcttgagcaggcccaaagaaatgaaacacagatggtgataatgttgaaaatgtttacctatttcctctctgaggacatcagattagccttttctgtgggcggaatgtgtaatctgctggaagacaatatcatccttttgatcttaaaatacatttttcatatctttgccgcaaaagctgattattatcatgacatttttaaacaatgactgttcactgcgcagaatgggaaaggaaagttcagctgaacgtatagatagatagatgcttgtcggaggccaggctatgggaatgaattttcctgtgtttcttctgcctggtgacatttgacattaaccccttcctcccggactcggtcttgtgcactaattggaatctgatgctcagctgtaggaattggctgctcctcatttacatgcagagaccattgattaatggcctcatccactccttccaaggtcactgtgttcccttttcttctggaagttaaagaatgcttgattaaatggcagaagcagattgaatggggaaatgtatggggaagggctttgttacaccaagtggggcaatgcagacttgagatgctgacgactcctttgtaggtggagcccatcagtgcaaatgacacaggcagctgagaagcgtttgattggccccgctgccttggctggctaacatgaaactgacaattctaagaggctcctcttcacagctcactcgcatcccttcagggcttcacagcatttcaaaggaaaggcattggataaaggagaaagcagcagaagtggaaaggacacagatttcaaacattctgtttcacattggctacagagttttgtttgtgcggggaaaggggtgagtctatgcataccaggtaccacccacctgtgtgctccagaaggcccgtgatgtcctgcccagttgctgaaatctataaaatgtcaggccaggtagcagcagggtgaaaggctggaagcagccagcaaaggaaaggttaacgtgcgcatgctgtttgcagttccatggcatgtggcatcttgcacaaccaggccattttgcaaccgagttaaaattcccctgcagccacagggagggaatagataaatcatgaatgaattgaaattatatttccttctcttagctttctttttttcttcttctttttttttttctttctctatctccccactccaggaaaaatgttacagaaaattataggttgtaaattccacccagtgcatttagctccatccttgctgagggtcagaggaatggaatctcaccagtcatatttcatgaggtctttcagcaagttcctgtactgtgtagagatctgaagggcaaaaattcaaaaagtcagcagggcacaaatggaccagaggtaggaagcagacaggtttcctggggcatcctctgggtgcagccaggctgtgtgtgctcccagctcttctcaactcagaaccattcatgtcacagatagttgggggctcgttcctatgctggggcaaaaccatagtgaagaaaattgcatgcttatgtggtgtgttacttgtgcttcagggttttttgttttgttttgttttgttttgttttgtttttttaagtacaactttgtatgatgtgccttgaccattgacaagtcttcagaaaaaaaggaaagaaagaaagcttcatactattgggtcctaacccaaagtgccagtgaccaccaagggctgttggcctcagcagggaaagcctgtgtctgggtcttgaaggcagtgtaggcagcaggcagagaatcagctggttttccccctccctaagctggactaatgcgtaagctacactgaagaaaggggagggtgaccatcccccaaaagcagggctcactagccaagtgtgtaacccagagcacatcaaagctaaagcaaaaagtagaagccaaagctatcacaaggcctaagttggcgtccagtccgagcatggcccacttgttgtctcaggacggccagcttcacagccagtgggcttcatctccacccaccaggaggtttgggctagggtgtgtgtatgtgcatgtgtgagtcagtgaatgatgtgctgcagaaatcagagatacagaaggaccctgaggagctcctccaagagtccctggggtcctaatataaccaggacattatgcccaaaagactgatccacatggctgaggctctttacaggaaatacctgcattgctaacttactatccccagaacgccctcccctgccttacacgtagcaagtagaacttgctgatgacaagacactacgagagctgggaacctagaagtattcggcgactgtcagacctccaggagcctccctgtgggttcagagggagcatgcacatgaacttctgggtgctagcccaggctggaggcattcccttcctggcaagggagcaggaggccagcacaggtttgcagaagtccatgtcctcaggctgtggtggagtgtgggcaccaggccaggagtcttgttcataattccatgtcaccaaccctttgccttttgaccattcacttctcttctaagaccttaagtatcattttgctcttgaagcctccttgaatatggtcttgagctgacataaaacttcccttgggattttccttcttttctctccatctagacatttctcttttgcaggcctctttcaaagaccctctcttgtcagcttcagctggctaagtctgcatgcctgggcctttctagcaggtatttgaaaacgcaatcaatgtatgttaagaaatgtaatcaatgaggtacacatatatatatatatgcttaaaaaacaaatttattttatcttttgctgtgttatcggtagcagttgcaatgttttaccttcgcccagaagttactatgccagaaatgctctcattcattcttatgggttcagcgtttccttgcctattattttcttgggaaataaaaatacctctcaagataattgcccagcattttcataggatgagtttgtcctttttctaaagcaggaaggctaggaagtaccaagaagaggagcctgggtagatgaaggaataaagaggaggaaatctaaacatggggagattactgaatgtgccatgtgcacctctccctctccactcttcctcaactcaaccacaaacctcccaaggcaggggccacgtctccctcatctctctaccctcctcctttagtatggagcctgacactcatgccttcatttaaccaacccatgttgagtgagggctactctgcaccaagtactgggctgggagtggggcaccgagtcaacaagacaaggccctgccctcaaggcgatctcagtttgtgaaggagattgtcaacagagaaaactctaaaatgaaatgccatgaggagacccctgtgataggagagaatgctttaggagcccacacatcttggggtctcagaaattgcaggcctggtctggttgctgagggaccaccccccacagaaaagaaaaagagccttcaagccccagagggtgactggcaaactttgtgtggtattcagaacagacaaattctaggtcaacagaatgtgggtggtggcttatcacagagcggggcagccatcgtgactcgcgctcggctgcctcatgaattcccttcaaatgttcccagctaacgtgtgattccatggtgagagaaatgccgcctttgagggcagagatattttcctttcttgacaaatagtttctatgtccaggcagccatctgccacctctgtgagcttatgagatccagcgactgctgctgaaggttcagattcaggattgatgccgaagttgtgtgtggaggaaggggtatcgctggtgcaaacccaccattcagaaaaaattaaaatccagcacccttccagctgaagcttgtccaggatttccttgccaagtttcatttttaaaagctctgcaactttactcagatgtaggtatttttgctttgtactcagattttcaccaaactgatatatcattaaacctttgtttttacaatacatgctttattgcaaaaccaatttcaacaaagtattgcagatgcaatgtaatttttatgtcctagttgttgttgtttttttttcttttttggttgctagggtaccaaatgcttttgagaaagtagcgtgatagtatctataatatggtggttttctggataagagattgcattatcctcatgtaatatatttgggcagactgtgtccatcatggctcagctagataaataaattaaaactcgctgattgaggaggaaatgtgatatttatattgctgagaatggtttgtgcttctcttctgacagctgctgtgttgctgggatgcctcatcccaacccaacttagttgtttccacttcttaggaaatataaaaatgctgtaatgttttcaggactgtgaaaacactgccttagaggctgggcagccactgttcctccaaagcctccatcccctcaacctggccccctcttcctgattagtcatgagatgacctaagagtccttattggacaccaactccgtgctggacatggtggcccttcatggggatcagtgcccttgcttggggcgtgctgtggctcccagccacagacccactaggaggtttctaagaaggtggcttgttccttctcttccatttccttctccaagttgacagccttgggtgggcaagagtcagggctggccccaaggtctaagctcaggcagatattggtccccagctccttggcctgggtccaggagggacttgccttgagatagcccaagataagacagcataggtccctatgtgaggcccctctgcccaggtgtagtgaagtgctactcccagggacaggttccattgcctgggggtgggagcatccactcagaagttcatctagtctgaatacaagatcttggaaaagctattatgcagtctgtgtacactcagatgtcatatgaagaccgtgggaattatgatgatgatgatgatgatggtgatgatgaagaactacagacttcaagagaaggtggcatgaatggggcccttcaggaaggagaaaaaattccatgttctgttactgccttctcactgtctgtgttgtcgttggatgtagaagaagagtgacatagaagatacagtatggcacactgaggggtggcctgggcttggatctggagtcactcatctgttcattcattcattcattcattcatttttgagcctgtatgtgcacaggcattgttctaggcactgatattgaattcaagttcataatgcaccatttgtataacctccaacaagtgacttcactgctgtgcctcagttgcttcatagagttgttggtaggactctgactaaatgggacactgcacagagtgcgcctgcaataaagaactgtcatcatcctgtcttttagatgtagtctgagaacagcagagctgtgccatgtgtgttctctctggcaggaatagcaacaggacactccactcagctgcctggggtccctggaagagcatccactggggctgcccaagcacagctcctgctttcctggattcaaatcctggctctactacttacaacctgagcgatcttggactgattgcttaacctctttgagcctcaatttcttcatctacacagtacatttaatacgagcacttacctcataaggaagttgtgaggattaaatgagttaatacatgtgcacctctcagagcctagcacttagtaaagcactagatgttagctgttgttggtggtggtgtttctggaggaatttccatttaaatgagaagtgcctgtggaaattgcctgcacagaaatctcttagctcaggaaaatttctctggctgcagatccctctaagaattcctgcattgttttcctctcattgctcagtgaaacacaaatacctttgtcgcctttaaaaaattcagttgtttggtttggtacttgagagatatgagcaaaggatgatacaacaagaatagtctatatcttcttagacatgcttctccccaggtaatcagaaaggcaagagtgacactctgccatgcagctagagtttttatatttccaatgggagtgaggccaggcagccagcttctccttctcctggcaaggctcttctgccaagttgggagggctccatcctctgtgccccaacagcctgctgtgtggaactccacggcagccccagatactctgtaggtctatctccccagccaggtgtgggctcctgggggaagagggaccatactttttgtatctgcatctacagtgcctgacagggaagcattaggaggcaggcagacagcaggacaaatggctccttctctctttggctgtggccaccttggtgcctatagctcatgcgcaatctcgatgctctcttcccttggtggagaggtacagcaaatccgttgccagacaaacagaaatattcaattcttccgcccaacttgaacaattctgtttccttctcaaatgcctcaggagccttggagaagttcctgtccctccccccaggcctcagtttctcatctctgagatgaggctgctctgtacccagcaaagtgttccacggaccctggcttagcccaagtacagacagaggtggtggctctgctccacacatgtgtttctgctgtgttttggtcctgttggccttttcttgatgttaacattctcttttttttcttttttgagacagacttttgctcttgttgcccaggctagagtgaagtggcatgatctcagctcactgcaacctccccctcctgggttcaagcgattcttctgcctcagcctgccaagtagctggcattacaggtgcctgccaccatgcccagctaatttttttttttttagtagagacagagttttgccatgttggccaggctgatcttgaactcctgacctcaggtaatccgcacgcctctgcctcccaaagtgctgggattacaggcatgagccaccgtgcctggccaacattctcaaactttcctttcgtaaacagcaggccctcagaaggcttcctgattggaagggaaacagtgaccctcagccaatgcaggtggaacaaatcaatgtgtgcagaccctgcctgcctaaatcaattcaacctgccctctagggactttgccataactgggaaagagcttccttctccgagttacttaggcccagatctaactcccatccttttggtttcctctccctccattcttcttcctctcccagttccccttctttcctccctcccatcatgcctctccctcctctgtccctgtctccctccactcaccccattccccctccagggtgaagagtctggctacctgggaacacctggggtctgggtcttgtccagcatgtactaagggctggcatcacctggctctcccccattggtctgcagccctgatctcccctcctctgtgaatgctccagctccctgatggatctgatctgaaaaggtgccggtagactctgcattaagtcagctgcttgtggcaccaagatgacaggtgtgatgttttcctggggatgccgaactgggaaaagtaccatctcctgttgtaatggagttaatggcgttccgctcaggacagctgcacttacatctggtgttaaaccaccgttatttaaactttatgatgtgagaggatgccagctcgtccacttgcaacatataaattatgtcgattgctcatgcactttttttaaccctgattcttctgaattatgaaagatggacaagaccagtggtggttctcagagctcccctgggccctgtgggccgtgagtgctcggtgtgtgtgcagatggctaaaaggaagcagcagggccggagcccatagcctcccccagccattagggcacagtcctggctgagcctcccagctcctgaggggcccatcactctgggctcagtaggttcaccctcaggtgacctcctctgccttcttctcttggggagatccataatgcatgtcataaagagaatggaccctacagctggtctgcctgtaaaagtctcccctgatagaaatcatcttgcttgctgtgggtttgcatcatgggctgttttttccttgggcatggagatggaggaaagactagtatttgtgtttggtgaggaacctaagtaaagctcttagcaaaaagaattctttcaaagccagctggtaagtggctattccaaagccacttgtacaggggctgccaacacaaaagccctttcacatttctgaagcaaacttgacctaaacccagaaagagaagcctggattgtaacttctgctagacaactgaccacagtgtgtccccagtaaaggcctagtgggaccccaagagcagaggtcctggggatcaattctgtagattccttttgctcaggatgaaatccaatttgccctccatttcatttttttaaaaaatttcctgcatttgccaatacttaaaagacccgcagggaaaatgaattgcacagtggtgttggaagggagaggaaaagagcgcacccaacagggaacacccgccatctcagacagaagtctgggaactgctgtgatggaccttgaaacacgggagggacgcagacctcacccctcacctcggaccccgcctggggtggttgcttgaggaaggctctccctgtaatccgccctttcagtcactgtctgttttccaggttttccccacatggagatcactcctggttgctttattgggtcccaaaccacgggcttgtctccaggccccaaccccagccacagctcctgcctttcagaggcccgcgcgtgttagactatttggccatggtttaccttggccttgctagctttcagctgacagtgtcatgccagcctccctctcacaaccccaaagggttctgtgtggtgcctgatgccacggaactccacatgatggggttgagatgtcccccaaacaaggcaccaggcccagcgttctgaagaggggtgtcggggtcatctcagtgccaggaatccacctggcaagcaggttcaaggtgaggcgcgaaggggcagtgcagggcgaggccaccctaccccccaggcctatggtgtgcacagacgcaggggcacaggggcacgtggggcggatcgttctgtagaacactcagcgcttgtttggggtcatcttcaggggatcagaggagtggggctgtttgcagagatgctcccttccctttcaacccctgtctatataatatatatatatatgcgcctgaaggctaccactaaaatggaaatgttatctgggagttgtcagaattacctccccagtataaattagtcaatcgccattaaacatctgggtgagaattagtcagctgattacctaaacattggtggcagctgtggcttcaaaagagaactagatttggggacctgaatttaaaaccccatcttatcacctttgggtgtcaaacttcattgtgtttaagaagcatctggggagtttgcgcaaaaggcggaaaattctgagcgccccccccccccgcccccgcacccctggggattctgaagccgcactgtctgaccttgggagctgtcagcgacctctcaacctcagtcttctgtctcgagagtggggacgttagtgtgttcccaatggtgtcatggtgaggacagtgacagtgagctgagctctgacagaggcaagtgcccactgctgccgttcactttgttgttaccgccctttaacttctgtgtgccctctactgtgagccccgggagcagggaacacctgacatcatgtgctctgagggaacgcattgaaaagccaagggtggcacctggaagggatgggttacaaagagccatccacacacctgcactctgggctgtgccactggcagcatacgggggcccccctgtttctctccttcagacggtgtgggtgctgggcctggtgatctcctgagccactgaggacggtccctgggcctgtggaaaatagaggtgcagggagaagtctagaagccatgactgtgactacagagtgaacagaaaccattcggcagggcagccctggggagggaagcagcatatggtttcagcaggggcaaattaacggaatgttatcttcctcctactttatgatcactgtttactgatagtgcttaatttaaagtgtgttctcagcatctcaagtgtgagcaaagactaaaccacggctactttcatgctaaatgtgaaacatggtgtactcacacatgcaaacaaagaggagaaatgacaatttcctccttgaaggtacctgaaattaaaaaatcttgccatctgttccaagaaagaaaaaaaaaaggagagttctgctgaaaaattaggaaatttccatcagaatggtgggattatgtagcttgcactaaaatgacatcttagaaaattataatcctaggctgggtgcagtggttcacacctgtaatcccagcactttgggaggccaaggcagacagatcacttgaggtcaggagttcaagaccagcctggccaacatggcgaaaccctgtctctactaaaaatacaaaaattagttgaatgtggtggcgggcacctgtagtcccagctacttgggaggctgaggcaggagaatcacttgaacccaggagacggaggttgcagtgagctgagattgcgccactgcattccagcctgggtgacagagtgagactcagtctcaaaaaaaaagagaagaaaaagaaattataatcccacatacatggttgcttatcatgtgtttcggtgaactttatggaattcgagctgcaggaaccagacctaccatcttatgaagcgggtcattctttctgatctgccagccaggtgcttctcaaaagcacaggatttggaaatttctgggagatgcatcaggtactattctgattcatcagataaaagtttggccttaagaaaagatagaatagtagagtggtttaaagggtggacttgggcatcaggtgacctgggctggacacttggccatatagaggcttggacaggtggtgcccacactctgtgccttgacttccccggctgtcacacaggctggtggtgacacctcaccaagaggcttgtcccagggcttggcacacaagtcctcctgtatatcagcatcactgctcttcctactgcctcttctgctgccctgacatcacagcacatgggtggcctcagagcatcggcaggggagcccaccgtgaacagtctcctgggtcctgaagagctgaaagatgtactttgtaggagctgtcttttctcttcagcctacaggagccacttgtggtctgaataccctagacctgtgctctcttcctctgcctccagaaccccctcagccaccagcccagtcatggatggtcagagtgcctgagactgaggtccacagaggggacaggatgagtggagccacagagctggggaggaccggggagaggcctggaacctggatccaccatcagaagagggagcagcggtgtgcagacatgtcctcttaggggcctgtgctgaaacaggaacctttgctgtagactttgggagggggctgggctgtgggaatacggctgcctgaaagaggaccggctcctgattcccacctgcggagggccccgggagggaggagccccagtgtgttccaggcaggctctcctgatagttggttaggaaccactcgaaagagaacacttggaggagtggggggagtgccagtgtcagcaagttgggagcagaagagagccccacagtgtggaacaggtagccagcagaacccactagtggacgagagcgtgaggggttgttgttgttaagacagagtctcgctctgttgcagcacagtggcatggttcgatctcggctcactgcagcctccacctcctggattcaggcgattctcctgcctcagcctcccaagtagctgggattacaggtgcctgccagcacgcccggctaatttttgtgtttttagtagagacagggtttcgccatgttggccaggctggtctccaactcctgacctcaagtgatctgcctgcctcggcctcccaaagtgctaggattacaggcgtgagccaccgagcctggcccgagagcctgcaggttttggtggggctcaaatagctctggctgcccccaaataggggtggggtggagaagtctcctcagatgaaatgaaggtcatgactgccatcatttttataccctacaatcaatcacttggggaaatggctagcccttgagtttataaaccacatataaacttgtagtatccattaaaaagaactgccaggggacacgtggtttgcctagaatggcacccagcctgccatctgctcctgtatgtaaattatctgtgttttataacctttcatggaagttgtttaaagaagactgtcttttttttttctcctttaaaactcaagtataaattcaaaactcacttaaataatccccaagaatttctctctgttaaatattgctgcagctctgacaggcaaatacacaggcctggggacccgggagggcctgtgcacgttttggggaagaaagcccccgattgaagcccctcctggcatactcccagctacccatcccagtctgctctcagcttggtatcttagagactcccaggtggggccaactggctcccaggagtggcgcttcatccccaggttccacaaggatccttgggagtccttgaacagagggcctgggtgagacagcataccccagcactgcagccaggtgtcagggcaggcagggccgatggggtggcagccggcccataggtgacccagacgaggccagacccacactccctggcctgtgctgccccgcagcagtgatctgagggagcactccccggcctgtgctgccccgcagcagtgatctgagggagcactccccggcctgtgctgccccgcagcagtgatctgagggagcactcctgcagccaggccagtccctcacctggaaatccccatagatggaccctcaccagtaaggcttttttagctggaagctgcccctctgcttctcgatttttgaaagtaaatggcacctcccatgccaaaagaaggcagacttgctctttcgcttgaatgtgaaaacactgggagcagaagcaggtctggattgctgggtcttcagtccttacccttcaagaggtgctatgtgctaggtgcagggcttaatgtattttcacacatgctggctacaaggtgtgtgtttccatctgcgcccagcttggaggctgcctccacctttccacaggctatgcaccaaggtcagtggcggcagtaggagacagtgggggttaaacaggggctaggagcaatctggcatctcgccctcctcccttggccccagaaatggaagctggaaggagagatgccatgggcttagtggagtgggtgaggggctgcttgagccctcgtgtctgctcatctcattccctgtgccatgggcccacagctaataagcaccacgtatctggggaaagagtgagttaccccaaggacaggcccatccagctccctgcagaagcccctacttcactttcattcctgcctggtccctgagagcccacaggctatagctgggctcagagaggggaagccagggcccagcagctcaaggcctctgattcaaagctggccagggcctggatagagcagcactgggggcacacgttggtctagcaagagagaaaaaatgaaaagacataacagaccttttttgatcaccctgcatggaacagagttaactgagtctgagcacaacatgtctgggcaagagagagaacagagggccagtatggtccccaaagagggccgggcactgccaggcagggtggctgtaggtaaggagggtgctggagctcccaggactggccttcattggtcatgggccctggagaagccaggtggcccaactgtgctcagtgcttctaaccatcatgaaatcatgaacggtctggagggcgaatcctcccatggggactgtgggcaagaaggtgcctacctatctgtctgtcgttatgtttttatttttcttttcttccttcctttcagttgtttagtcatttaacaaacattggttgagtgcctgctttgagccagacactgtaaggactggaaatacagcagtcaccaatccagacgtggctcctaccctccatgtgccatggtgggtgagcaactgcagcccagcacaagtgcccaggaggaaaagaagggggtgtgtaggagcatataggaggaaccccaagtcccaaaatggagagataggatgggtgcctaggaccaagcaatgtctaaactgaaagcacaccacggtcttaagcaagagagtgagggggagtattctgaactgagaattgcgtaggtgaaagcccaggccagacagagccccatatggggtagtgggtttccgcagacagtgaagtgtggctggaatatggtgcaaggggcagagatgggatggggcctcctatgaggctggagggtccctatgggcagtaattgacccactagtgagtgagtgagtctgtgccctcctcagaatatcgggctgaacccacagacaggctggcctgagaggagctggatttcttgactaggaggagtcagagcaccaccaaagcactccaggtccagacacacccaggctcagattggagaacatcatctaaaaagcagccacgttaggtaaaagctcagtatttccccttttccagagggatgggcctgaagggttaaccatttgccctggttttaagaaacagatgtcctagcagaagggtctggggacctcccaacaccatgaatgagttgcgccaacactagagagtgtgacaatttcagttcaagcttggatgtttagaacattggagtttttgctttcccagatgggaatccttaaatgttgcaatttcttctttaaggcaaattagaggaatcgagctccgcttatcactttcttgcacctggaagaaatctcagataggaatgattggctatttttggaccttgagtgaatttaaattccacatttagactccaccacccatgtttgatttctaattagaatgtgacacttaccttatgaacacaaggtgtcgtgcagaagacattctccaaaggaggttgaggatgcgcagaaataaaggtggtccatatggaacaagaatgatatttctgcaggtgtatttagaggtaacaattttctgataaatggaatcttcagaagtattctttaaaaatcaccagatttgacttattgtgctttgctcacatttattaaacttattaagatatacaggatacctgttgttgctttgaagaaggtatggtgtgtgtacttggatacgatgaaaatgaaacagatagatcaggtataaagtctagagatgctaatggtgttgggtcagttgtataatgcaggctttgccactgagtggtttttgttttgctgactccaaaagcctgattgagcctctatgactcaggagaagggaggacatgaaatttaggggttctgtgacccagggggtcataccacagatgcctccatatttttaattctcacttctaccagggctcaagattatgtaccactgcgtgagcatttttaaaaaactaaataaaagaatgacaccatgctatattatattggttttgctgaacatgcttttattgactctggtcaaaaacggatgaggatttttttttttccttaaccttgatgaatagtagataaaaagcatcaacatcacatctcaagaaaagctgcagaagagaaggctcaataaaaatggatctgactccatgcaagcatagctctatttagcatctttcattctaatgacttaatggccagataccacaactatacaattagcaacaaagagaagttattgggagctgaaagggatgcctgtgtcatcaattttcagtcctgttgtctcttcgtgtaacctaatagaaggagactgatagctaggatcttgttatcccatggcacggacatgtaggatttaaccactgagtagtttatccttagccaattagccattggaaggtgattgccacctcagataatcagttgagacctttgcatggagactcatcctcactcctcctggaggatgctgtgtggccctgcctctgacctgcatgtctgagaatttattgacagctcaaatccacagaatgggatttcgccatgtgacaggggctgtccctaccagcccagcttctcaccattgtgggtacaatgccagcaactcactggttgattggcagcatggccacccatacccattcagaggcatgaaaagagctccaccagtgaacatccacttgtcccaggccctgccagcctggactaaaatccatgcaagagagaagctgggcttgccaggtagccagtcacttactgtgtgaagctaccatgtgcggagcagtgtcagccgaccctgctgcactggagcatgcctgtgggagggagtgggctctggtggcaacattgctggagtggggaaatctgagttctctagtcctgaccttgccaccagccatctctagggcctcatggaagtgactcaatttccctggacttttccggggttcagtagccctgtctatcacttgcttgcctcaggcctccaagcaggtggccctcccttgtcctgtgctccgtgctggtggattttccacttgcatccctctgtcactgtgatgggtgagggctggaggcacagtttgcctatctgcactaaacgtttctcggccactgtagcagatactggcagtgctctcattgtttcctacacactgaaggcatcttttgcaactctctgtctcccctcggggtgctaccaggatgcaggggcatgtctggtcagtgcacagggcaagccaggagtgctgggagttcatgtgtccaggagtagccttcaaccaacaatgagcaagagttgctggataagtaccagctctgcacccctcaggtgcaggaaggcatcctgccccatctcccaggtgccttcctggcaggcttaatcccagctgcccacagtgataacctgctcattaatttgccccgtcttggcttctttctctcccttctttcatttccccatctccctaccagtgcttcctaggatatcacttcccaatatatttgcattcaattcctactcagagtctgatttcagaggaaccacatcaagactgccccaagccaggccctgtgctgtgcaggccctgacaccgggagtgttttcttcctttttctgactatcctcaggagcagggctggccctgacccagacccaggaggccaagtgcaggaggcagtagtccactgtatctgagcctctaggacacattcctcctctgtgtggtgctgaggtgggcccagtggaggtgtggagaagtggtgggtgagggctgggggcgtggttctcatgtcctgcctgaaacgtgtcttccacgctgtgtctgggctaggcctcttgcagtctccactgtcttctcttccccctgcttggacattcccaggcctctcagaggttgtgttctgccagtggaatgactcaggccactaccctgtgcctccagggaggtgacccagctccatggaaaactattagccctccttggcacatccatcctggggaggcgataagctaagtccagtaccgactgcttctcccaggaagttgaatttaaagtctcagctcaagcctgacattgccataagcagcttggtcggccagccagatgtaagggctcagtgcagccccacattaggctggctgctgagagctccccatgggcctgtggagcagaagctgacagatgctgagccttccacaagaaagggccttgaagtccaaacccttgccaaaaacaggcttggtgaggcatcttacgggcacccctgagctgcccacagccacccaaatgatgtgtcttgttcctgtcaagacaccttgtcagcggcccaccttgcccgctgaggccctctccctccacagcgcccagaaattattcagtgaatgggtgtagccccgggttccagagctctctcctgtactactcgcccagctggacctgccattcttccacagccagggcttgtgctccagggtgactcttcctttccttcctcccgaccccagcatgtcccccacccccagggctctgctcactaagaactgtgggtctgcagcatgactgaacagatcctctatgcttacagctaacacagatcaacgtctgacccctcccagggtgtccacgccctgaataaaacaatgcctactactgaggaagtgaattcctaatgaaggcatttctagcactgatggtgccaggtgtggggaagagggtgggggtgggctaagtacatgaaaaccccgtacctgcccccttcggcaaagccttcccagtggtgtggcctgctctcccatgtgcatctggagcctgcacgctgtcaggcacagccatctttggagaatgaccctctctttgccctcatagatattggtaccagagcttgcagcacctcttattctaagccctgttttagacgaagggagagatcagccccaagagggaagggactctcccagttacccccacgagctggcacttgaagacctctgaagcaggagggatgaaggcaaggcgttttcttaagttagctagcaacctggtcctccagagctgtttctttttagcggtagaaaggacagccagcctcccacctgacaacaacagaatgaaaaatttaatgtgtggtatcaatcgcagtcccacccagaggcctcaaatagcttttgtcctgattgaaggtagaaattcatggctccaggagtaaccaaatattggcaagtttgggcccggtcatgtcaaaaggcttctaaaaagaatgttttatttaaagtcaataaataatagattcaaaggtctcatagagttctagaaacataaaaaggaagataggcctagacactcttgttctattcccgttgtccaccctgtccaccccaccccatcctcaggtggcccaaactgcttagatgttagcaagggctgggagaaaatccctacagcccatcacttcatcccaagctattagggaacacacttggccatttctctgtccaagtttccttctagacagtgttacaataagtagaataagagcaagacaatgtgacttcacaggtacatgctttattacctacactgacttccaccaaagtgggcaggaggaatcaaaggcgcgtgaggttccagaagatcttgagcatccgcgctcatcccagcccttttttatataatgcaagttgtttctcacataaccccattcttagcctgcagccagatacctccctaactcctcctcagaccttccccaaaggcagagctaactagatcagttctgctcatcctcaaaatcaaatttatatcttgcatgtgggttttcctcattataatgtcatttccatgaggtgtgagccccattgtcagggcaatccggatgatgaatttgcacttcagccttcactgaaatctttacttagtcaaactcccactgtgttcctcactcgtcccacacttgtgatcatgtgaatgtaaaggttctgcagtttccaccagatccacctccttcctccacaccctgtatctatttctctacatcttaacgacatgtacatgtgtccctaaattcagggacttcatatattcttttctattaacaacccctaatataattcctaccaccaatatcatatattctccttccaaccaataccatctgctgcatggatatatcctggaaagggttttgaaatacccacaccaaaaaactctactagcattctggaagaacaaattaaatcaattcatgacttcttgcctgtaagcactgaatgccagaagataatggagcagtatttggaatgtttcaaggacaaaagattatgatccaagaatttgtcctctgcctagatgttgttcatgtcgaaggcaaaagaaaggcattctcagatatgcaagagttcagatatacaccatcttcctgctttttcttattttttaaaagaagtacttcaagtcatgctccacctaactgataaatgaatcaaaatattgtatcataaaagaatgagccatgagattccaaacaagtcaattatagaattaagtatatataattagagtaatacgttacaattcagtagctataaattccaaccaaagaaagaaaagttggcccacaaagctgaagacaataataataataaaaggaaaaggacaaaaggagaaagctcaataacataaataatgaaaaaatgtttaaaagaaagtgaagagaacaacttctcaatgacaatgcaaagactccaaactgactaaaaaaaaaaaccatttactggccaagtgcagtggctcatgcctgtaatcccagcactttgggaggctgaggtgagtggatcacctgaggtcaggagttcaagaccagcctggccaatatggcgaaaccccgtctctactaaaaatacaaaaaattaaccgggtgtggtggcgagcaactgtaatcccagctgctcgggaggttgaggcaggagaatcacttgagcccagtaggcggaggttgcagtgagccaagattgcaccattgcactccagcctgggcaacagggtgagactctatctcaaaaaaaaaaaaaaaaaaaaaacacctatttactatatactatatacagtttgcattaaatgttggctactaaatattctttcttcaagctcaaatcttagagattaaatgagcaatcctgtgttctgattccatattaccttctcaagctacctcaaccatgcccaaaggttgaaatagtgcccaagtgcggtgactgtcactgacggctcctacttagacctctgctctgatttccaggccaatatgtccaactgcctacttgacaaaggcacttgagtgcctcaccggcaactaaaactcagaatgtccaaatctaaactcatggtctttccccatcactaaccttcctgccagaaaaacaaataaacaacaacccaaaaaagcaccattctccaaccagtgcttctatctcagtaattggtaccacccttcatccatcttcctaagccatagatctttgagccatctttgtcacctctttctcctgtagcaactcaatccaatccatcattaatatttttggctctaaatattacacacatctcaaatccattcacttctctctatctccaataccaccactctaattcaaaatacagttttttctcaacaagactctcataatcacatcctaaccagtctccctgcattctttcttgctcccctggaatctgttttccacccaaataccagagtgatttcttttcaaaacacaattggtgattatgtcaatcagtggtgtgctgataaatgtttaacaaccggctctcggtgggaaaagtcctaatttatagcatttgccaatttccgtagtgtaaatactactaccgtggatgacttcagttgaccagtccagtgatgtcatggaacacagagtcgggaagagatacgaatcatctgcccttataaatagtagtctccagcatatcattgcttgtaaaacttctgcttaaaactgtttaataacttctcaatgcttctagaataaaggctcaaattctcagcaggatccaaaagatcctgcatggtctgaccctattaacctttctagcctcaactcacaccatgttctctttgttctccatgcctaaccccactaactgacaacacactccttcctgccacaggtcatcctccatctggagcactcccactgcctcccccttacccagtttagttaacaaacacatcttttggagctgagcccaagtgtcccctccttaggaaagcctttcctgagccaattccaccaaactaaattgtccttccattgtaaacttttgtagcacttagctcataatgccatataccataaaacataggccaccattgtaattttacatatacttatgaaactattggctgatgtctgtcttttatactatacttagaataaatactatacttagaataccctcagaagagggtaagcattgtatttttttgtgattaccactgtattctctagtgcctaacacttggcatgtgggaagtattaatacatttctgatgcatgagagaatgaaaagacacacacttaaagccaaatggcataaggagattaaaggaaaaagagtgggcgaagttctgtttgtcaaaaacaaaaacagaaagcaagggtagcaatttagaggggaagtagaattcaaggcaacaacactaaatgagaaaaagggatgccattttatggtgataaaatccatgaagaagatgctgtggtcatggagctttatgtaccaaataacacaatatcagtgattactgttaggaataaaaggaaaaataggagcacaatcgtagtgtgagagtttaacataccagtagaactgaacagaaaggccaggagcaaaccttagaacatagtgctaacctaacacagcatttcaaaactgtgagaaaaaggatcatcagttattttcaaatggtactgggccaaatgattaagtatttgttttaataaggtggatgacttcatattgcagttggatatggtggctcttctaaagcacttgtcccaaaacgctcttacacgacattaataaacataacaagaaaaggattctggagtcaaatacatctgcaaaacaccatggtaagcaaagttaagcagatatttttattgcaggacttttaaccatctttggtgctactgtgcatgctacaatcccaagagggaactatagcacatgctattcccagaattacttgagtattttgtgagactggtgtttcatgttctgcagaaatcacttgggaaatggtggcttaaaaagttaaataaaacacataaaatcataaaagacctcaaataaatatgagcagatatttttgtacttttactaaggtgagtggggctttcctaaaccacataaaaaaggaagatacaattagagacatggttgatatatttgatgacataaaatctttaagcttctgtatatcataaggcaaatgaaaaactggggaaaaatagttggagttatgaatgactttactatagaaagagctcttagtaatcaataaaaaagatgaccatccacatagaaaagtttgtgaagaacatgaacagagggcacacacacacacagacattcacatccatccaccaaatacacatcattattaaatattagattctgaaccttcctaataatcaaaataaggcaaattaaaacagttaacaatatatttttggccatgaaatcagcaatttttaatgataaaattcagttttagcaaggatagagtgaaaggggactctcaaatgtagccaatgaaaatataaaatggcaccaactctgtggccagtaatttggcagtacttatttattaagtctctttttaaacatgcttttgattcagtaattccacttcaggcaatttatcacaaggaaaaaaatcagagattgcctaaagatttatgttcagggatgtttactgtagctttgtttgtcaaagcagaagttttggaagcagcccaaatgtcaagcagtgactggttaaaggaaatatggtgtgccccatatgatgagatattattcagtcattaaaaattatgacttgtggaaatagtcacaaaaagaatgttaagtttaaaagcatgatataaaactacttccagattccaattttataaagtacatatgtatatttatgtaactggaaaagactaaggtgaaatatagtaaaatgtggagttattctctctgaaaaacattccatttattttataacattcccccacagctcctcatctaatccatcaaaccaagtcttatcaactctacttccaaagcgcaccttgagtctcgtctgcttctctcatcaccactactatgccctagtcaaagccaccatcatctttcatctttagaaacttagaagcctcccattggtctccctccctccccttttgccccgttgcagaccaatctccatgcaatagccatagtaatctgttttcaatgtaaatcagattgtattaccttctgcttaaaaccctccagggctttcccatcacaccttgaaaaaaaatcctaagcttttccctttgccatggctcggaggcccctggaatcccactgctgcctccctatctgacctcatctcctgccacgctcccttcccgccttgcttcagcctttctagcctcccctcttggcccagacacctgcactggccttgacaccagctcttccctctgcctgccgtgcttcccccagctctttacagagctgacttctcctgaggtctcagcttaaatccacctcctccaagaggcctcctgatcacccagagttgccaccctgactttacctatcgaatcaatgtattttaattgtctgcactcacgaccatctgattttttttcttaactgactcctttctgtattgtctaagctttgcccatgagaatataaattccattgcaggctgctatattcacttagaacactgcctggcacttagtaggcaataaatgcttgccacatgaatgaaatagaaatcaaaccaaaaacatttcattgaaactgaaaaaggtaaatcatgccaaacagcttgacttactaacagtgctcaaaaaaatcaaatactttggaaaatctccaggcttgaaggggtgccctacccttgcgtgggtaccccgttgccagttagtgggtaatccttcccccgtctaacccaccagaccagaaaatgacactaatatggacaggcaggtggaatggatttgcacagtatcccttacttcaaaaacaaataggactattaagcttttgcaggtctctggggaacttgtccaggttttggtgaattccaatgagctctagttttaaacatgcaggatttcagctctggcttttagttcactgaaaaagagaacagcttagattttctttgccttgcaactcctgaaatttctctttccttctttgacagcctgaggagtcaggggcagagagaatagaggagccagatgccttttaatgagaaagaacccaagaagccttctgcactctctttgtaagccatttcttagtactgcttaaaagatctgggccatgccacacatagcaaggcacagaagcatatgaaaaattgccagatttagtgcttgtggcttggggtgtactgcaaggatctctaaagatggagatttgttatgttgctgtggataaatttgaatcaagtgtaatccaatgctgctgtgtgaaaatcagtcagttaccaagtgagtgggcctcgccagccacccacccacccagcatcctatcttccataggtttccacttgacactggaatataagatttgtaaggagcagatttctgcctatttggtttaccaccaaatccctggtgcctagaacagcacatgcagatagcagatgcccaataaataattgttgaataagttaaaggagaagtaatattttccccatttactgagcactcactgtgtgcctcacctggctcaagtctcatagcagctcgaactcttaattctcacaccacccccacaaggtaggtttggcagaagggagcctgagaaattaggtactacaaatctctcgtgcagtgcatgtctatttgaaagtttatttcctttgcaggttattgtctgatgttcatggcattgggtagatattgtgggagaggcagaaatgtcattatgaagagaatttctctccattagctaatgtttagagaggcattgtgacatacaaaaagaccattggtcctggacttgtcacatctggattccaaatttacctccttcactaacctgtgtgaacttcaacaaatcacaacctctctgagcctctgttttctaatctattttttttaaagataatgaaaccagtcttgccctgcttgaatggaggtatagtgaagtgcaatgacagaacagatgtgattgacaacttatacttacaccctctgtcttactgaattgttatttaactctcaactgaggtaggtccatcagtgtttggctcagttcatggggatttgtgtctacccttgggtacttggattttgcatataaatgagttcttctatataaaatggttccaatgtatcttgcacttaataaatgctagtatcactattgtaattattaatgaaaaaaaccccaaggattcattctggaccctgaatacaatttttacctagacccaggtggccaatgcgttttgttttgtgtggtattcaggttatttactgatgtgtaacaaattacccccaaaccctagcagcttaaaacaactaccattgtattttagttcatgattgtgtgaataaggaattaagacagggctcagctgggtgatttttctgcttcaggtggcattgactggggttactcagtagtgtcagtagcattcagctgctggctgggctataattgagggccttatccagtgttacccacacatctagcatcttgacagggtcagctggaaggctgggcttagctatactcctccaccccttgtagtctcagagtatctcttcccggtctctcctgcagggtagtcagatctcctacatggtggctcaggggtctaagagtgagtgttccaagacattcatgtggaagctgcaagccttcttagcttcagaagtcaagtcttggctgttccattctattgttcaagcaagttactaaggccacacctaatttgagaggagaaaaattgtactctacgtctcagaggaaggagcatcagagaatgtgttgccatctttaatctaccacaggtggtaacacagttctcttggtagtggctgcctggagtgatgtgagaggtaaataagaaggccacatctgggttcagtgggaaagtgccagatgtttaccactgtctgctgggggaatgggggcctgggggccctatatttgcaacctttgacttagaaatttctccctcatgatgcacccctctaggtctctcctattttcttcctatcaacatgtatgtgctgttttttccatcaaaagtccattctggttgcatttaattattgtccaccaggaagtttaatagaacactttattgttcaccaccactttgcaggaatgaaggggaaattcttgtttgtataaggtgtccttttcctctaagcctcctctgcggggcctttactgaagactctgctgacccccctgtatagttttgccaagttagagttaagcacagccagctaagcatctcaatatccagttatgggtgcattcttcaaaaaacagtcagtgaatatcaccagtgttttgtgtctaaggtacatcaggaatttgaggaagggaaagagggagggaagagcaagccaatctgttattttggaaagtcatattttacccttttgttctgtggagtaagattttggtattaatttggctaaaaagacacgggtggtgccgaggcatgcctgaacagtttttcctccacttctcttgctagttcatgggtgcatctgtgaccaaacttgtaaggtctctggcttggctattcctctcccaagtcctgctgagatgatagtgatgaattggagactgtattcatttccatggcaacaaacatcactgtcctagagccactcctcaaaccctttgcaaataccactttttcattaaccctaacctctgagacatgtggaaatccatgcagaagcagcaagacctaccccacagggccactcaaactggagcaagactaggcttcaggggagcagcaagctccaggtacacatgaacagcaggtgaaacaaagacaattaactaaattggtttttctacaattgtttcctctgttgcaaagtttgcccctagtgtgaaagtctcactttcaacttacattccacacccaagcagctttctatctagagtttgaaaattgcttggacaaggaaaaattgcacctcacattttccaagtgctttgtatatcttatggctgtccaatctttctcaagtactaattatgagcatttatttacagctcacgtctcaaatactcatagtatgcagtgtgtgtctattaccaatgatttgcccattaatcaatagagatgcgaaaacaagaatatgtgaactctggcacagacccaattaacctgaaataggagagaagggactttatcctctaattgagttacatcttgaggtggagtgagctgatggattctgggaggtcactgagggatggtggcctcatgctgaaggtggatgcctcacggggaatggattcctaaacttaccgtgctctgttcttcttgtagacaacccagggagtccagcaacccatagtacggtgcatccaagagtccagaaacccatagtacagggaatccaaatgacctgataagtctttaggagcctggagattcacaatcaagaggacaggcctacttttgaggaaggcaggttctggagggagagtgagcttaaagtcagcccccattcctgatatcttctcttggcttggctgttgttccagcttatgtggtttcttcccttcatccctggggtgggggagtcacgagcatagacctggtaccaggcagtcctggggtagaatcctcattcagcctgtgttcccaccaagaaaatagaaataggttgtattatttctacctcccttgtgagattgttgtggagatgatcatttccagagggcactttaagcagaacttggcatgtggtaagagctcagcccacatcagtgccattgccatcgtcatcctcaggctcatttgaattaaagatgaagggggcagctcctcggcattcatgattccatgggctgtgggcgtcctacgagcagatttctgctgatgtgagccaacgaggggcaaatcagtttaaccacatctgggacccaggttagggccctccggagaagaggctttcacagggtaatgctctatggaaactttagtgttgggtttcttcccctgatttatgctatccttaggatcccactactagggccaggaagaaataactgaagttcctgcatgtgaataagaaggcagtcacttatttctggaaactacagctgagacttggggaagctgcttaggatgatgacatttgcatttcacaccataacggaaatggtgcctctgtgtgtcgtagtttactcttaacaatgaagcattgcatgcccactacatgccagccctgggctggcattgacaattaacagaaaaaccctttggaagagtcatgttaagtttagtggccatagagcaaggagcatccaggatgagagagccctcaatatctggagtcgaggttgcttctgcagagagtgaggacaggagcccctatatgcagcacctctgcacctgggcagtcacttgtgctgtgtgaccacttggtgctcagggcctcggtctctgcagctgctgccatgctgagaacagcacaggtgccagttcacacaggtctcatgcccaggatgtccttagcagatgcctcacagtggatagctggaacccagaatggacctgacccttctgttgttcgtgtcctgttggctctggacagggtaccctccacaagcatgtcaagcaaggccctgggcagcccctacccatggtccagttggaggtggcagcaaggtgagcttagtaaggcaccagcttagggcagctagggcaagccagagagtcagagatcacagcccagatggtgcagcaggccctacttctgccatgatgcgtatgacagattacatcatctgtctggcatacccaggtaaaatagatcaagagtcctgccagttccacacattggctgcaatcccttttatacacacacagtttttcatcgtgtaagtgtatggcaatgatattattacagggataaatttaaatccacttgaaattcattatcataaaacaactcatttccaactcagcacacctgaggtattgttattcacacattacttgtgacctcccaactcacacaagttgatatctgggtatagagtgtgatttttctcccattagggactccagaagagttcttgaaatagctgcctccccagctccacctctcaccccttgtgcctgcccaatgtttccagaaggcgcaactatagacagcaaaggtcctgtgtgcacctccccagagaaacccaaaccctcacacttctctggagccacatggccagatgaaacctctgagaaggaaccaaagccttgtctgtcctgatggcagaagttgcaaccctgtagggcttctcaacatgtgatctaagaccacagctttgtaacctaactcagccacggtcctagttaaaaaggcacattcctagaccctgcctcagaactactgaacagagtcactgggtgtggagtccaggaatctgcatttttacccctatcgcccccgccattcccgcccttccccccgccattgcgtgcactaattgctggaagcactcatgaggagagccgcctgtgttgtgtagaactcccacccccgcaacacacactcactcaccctttcacttaccaacagtttcctgggcttgggaggtctggagaaggcagtagccctgcaaattgagaaaggcaagcctcggaagtggactcttatatctctactgccaaaaggggctacatcctctcaggcccctgggttcattccttgagaacagggctcagctgtgggagctgataaaacaaggcacccttccagttactgagcaccttctggtggcccacactgtgctgggcattgcacatgagccgtctctcgtccttggggaagatagtagttgttatccatgctctataggtgtggaaactgaggcccagagaggttatgtggctggtccaaggtcacacagctgaagtgagattgtaacccagggctgcctgactccagagcctgtgtgttctccagtggtgacattgctggggtagtcttggggggcagtgtgagctagttcataggatggaagagtactgtgaggaatgttggggtatttcaaggtttgataaaccaaaattcctctgggccgttgggcatttgagagacggaacactgagaacataagacatgctgagatttaggttgttttagaacctgaaatctcagcttactcctcccagaacttgtgctgactttcggaaaaaggaaacattttagcctggtttgggttctggattgcagtagcagtggtgtttgctaaactaaagaagggaactggagcttctatcagtgcattattaaagcagaactggctgactgtctccctgggaaataacaggactgaggcttgtgcctccagccagagattgctcctccatagcccccattgccaccgcttctactacttttgcctccactccccagccacccagtgatccaccctgccagaatgcacaatgccggcattgatcattccccaacccacggtacagttcagtttcctctgctgctaattggccatgagagctccgttatgagggatcagaattgttagtctcttcctaatgatctctgtctggagaccaacttcatgacattctccaattagggagtgcggagggggcagggcagcgctattcatctgcccagaacccccatgaagtgacatgggctcattatgcaggagacccaagccactggtcctgcgggtcagcacagcccaggagagccacggaggcaggtctccccctctcacctccccagactcccggctatcctttgctccctgtgtcctcccttcatggcaaagactttcctttggtcaggcttgaaggacaacactctgtcttctgctagcacactctgtgctttaaaaattcctaactgggaaagatgacttcttttgagatcaaaggcacactctcagggatgttggggcaatgaggaaggtgaaagctacagaggaagtcaagactggtccacttccagctccccatatgtggaagaagagaagaccaaggccaagagagaagggtcttgctcagggggggtccccagcacttagacaggaagactagagccccccacgtcattcctgcttcccttctcctcaccctaacttcaaatgcaggctctttatcctatgtccctgttctccctttggacccagccagcttctggatttcttccgccacttggcttatcgtgcagtggacaaaccacacggctacacttgacagccagaaactggatcataagctttgagggcaggatccatatctcccttattctctgctgtgtcccaggacctagcatctcacccacagtaggaacacagaattattcaatgagtgaattaattaattaatgctttaactttaaagttcaaatgtagagtttcagagaggaacccagaagggctattcaaagaaatgaatatccaacagtggaaattcagatattacagagtcttgggaggtcagttgggcattaattctttcctcacaagagtctgctaattacttttccaggttttctgctgaacaatttgaactcacattcgacatagctttcccttttgtctctttcttaatatctcagcacaactcctgctgtggggcattgttaaacctcaggcctggagggtttggcgatgcgcggttaacagctttgccacctggggatggcattatctctgccagcctctagctgacttgctctgggtctcctgctgggagacaagaccaggctgggacaggccattcaaacagcttgagagcagctcttaagacaaacctcggacttagctaaggtacctttttttttaggtcactttgaagaaatcttaatgttaaaaagatttacaaactaaaaactttataataaagtgttgtcaaaaatctgtaacaaaatctacatcaagtccttatggtgtctggaacataataaatgtgcaatacatgtgagcccgtagatcttttctatcaatactcacttgaaatagattaatccacagtctaatagttagacccagtctgatgcgcataagaaatgttgctatatcttttgttttgtttttacagattttcttttgattaggttatctatttgatgggaagggaggaaaggcctagcattttctgcacccactgtgcaccaggaaccatgctaagtgccttacatttcactatggcatgtgcttctctctatgggcttcagggaaaggcttattctcccattttccagatgggagaattagactcaagatctcaagatcgttagactccaaagccagtactctctcctttacgtggtatttagaagtgagcccagctatgggaatgctgcctagtgaccacatggtcactgccagcttccctgtccagaccagccttcccttggcctgagatgtgccatagtgcctctcagaggacaccatcacgtattcctgtagtgcttgagtgtcaccaacctggagacgccgtgggacagcacaaccagggaagtcgtagagaacccaggtgcccctggacattctaaagaccatcatctgagagactgctcggaaatgcaaagctcacaaaacatgtcatttcctgtctctaaggtattgaatacaaatatcatctccttttatctcccatctccaaaacagtcccctcgggttgtgtctctctcaagtgctctgtaaacttcccaaattgtcagccggtcccaggagatgcttccatcacactgggtgatcatctcatgataacttccgaactggcctcctgcactgttcacgggtctgggtggttacccgcgcagcagaatcactcagcaaacgcttggatgtgcactgactttgaacggctagaaagttcaggggcaccacctgcctcggagctgctgcatgactcgggtctgaggtgtcccctgaaatcttggggacaggcacttcttctgctggcgtcagacagaatgtggtctccccacagggagcccagtccgattctgcagagcccggctcggccctgctggtctgcgggtgccctttgccctcgtgcacacagcgacacctggtggtaagctggtgaaccgccgggaccccagcgctgttcctcagctctatgctgggctccagctcacgtgcgctgtgtgcaccgagggacttgtcctggcacgtgcacacccagtcttgtgcaccaccgagtactccgttgtgacaaagttatactcagttatgtatgtcttcttcctgctctgtgcagagagcagtcccgtggcctcagtcatgagtcatttgtctgtactcattctcagaggggaagaaaatgagctgtttctaactacgtctatcgtcaccaccccgatcgccatccttactgccatcaaccaccaccatccctgccgtcaccactaccattgcctccaccaccattagccatcaccaccgcctcaccgccatcatccccaccacccctcgatgaccacagccacctttgtgcctttactactgtcaccccatgcactctgtcgctcctgtagcaggggctaactcctcacatagcagcagaattgggcagccctgcccgctgaggttccaggagggaggctgagggcctcttccacagagagtgctgtgaaaggctcttggaaggagggcaggaaggacccaagagagcaaggcagagggaggatgggccttctccagctcctagctggcagacaggacagcacgaggtaccgcctggatgcatttaggactgaagtttctgctgatgtcaacgaatgctggaaatgtcccaagaccccagttcaggactgcgcctcatccaggtgagcagtgcagagcagtcaaaaggggccaggaaacaagccgcccattcattcgtgcagtccaagaacaaagccagcgggccagctccaacctgttgtgacagaaataccaggggatcttttctttttctttccatttcccccaggcagcaactgtacaaatgaaacttcaaaactagagctcggccgttcagagcctgcacagcactgacctgtttcttgttcatttagcctcattctctcagaagacagaaagcctcattcatcagaacaatcacttcagcccagaggggcttgggtgttgtttctaagacattacaacttgcagccataaaggaaaaatgaaataaacgtggcaagagttttgaagtggtctgaatgacccaattaaacacatattttcaagtcaaacacacctttcctaatgtagagatagaattgttaaatttcacaaattaccatgctcgataattgtctaagagtaatttgtgtaggatgacactgttttctatttactctcattccctaggtgatgtcttctagtcccatgactttaaaatcttccatttctacatctccagggacacctccctccttgattttccccacttagacacgtaatagccatcccattcttaaagtagttagaacaaattctttgatttttttttttccttccaaacctggtcttgacacgttttcccccttttagtaaacggtaaacagcatcctcctcattgttcagctgcaaacctacacagtccttcttaccccgcctccttcactcacactaccctccactgtctcaccaagccctccgctcttcctcagtgccccccagtccaggcccggctctcttgctcagacctaggctgcctccctgcttctccttttgccacatttctgtcaatcctccacccagcagccagcatgcatttgaaagaacatagatcatatcgtaccactctcctgcttaaaatccaccagtggcttgttactacacttaggacacagccagagctccccacccagccctgctgctctgtccccaactcgcctctaaccccatctttgcccacgtccttcttctctccttcatcccaatcatccttcttgctcttccttgaaaacatcaaattcactcccacccgagggacttggcactcggtctggactctgatcctcttcagcttgttccctcactccatgctgaaaggctgcctcctccaagaagccctccctgaccaccttatctaaatatcccttgtcccttcactcctcatctccttttttagttttctttttcttcatggtacttatcacttcccgcctgtctcctccactcaaatataagctccataaaggcagggatttttgtatgttttgttcactgctatatctctagcacttagaatatggcctggcacacactcaataggtatctgaatgaatgaatgaatgaatgagtgagcatgatgcccacccaaagcagcttgctgccaatctttgtgtcctatgggctgtcattcaaggtggcgggatgggctcacttgttatcctcctgagagcagcacttagagatcatttctgaagacagcacataaggcgttggaaatggctccccctcctggaccagcttgctagtgttacccaccgttagggcaatggccaccccgtggaatgcacaccacaagggcaagcgaagagctcagcgaatggggaaactcttatcccatatgctcagctgtcgggcctgggatcatgcaagggaaagtatacagacagcaggcaggggagtcccccgacagtggctgtagccagaactggccacataatttgtaggacccactgcagaaggcaaatgtagagcctcagctaggggtttcctttgggcccactgcccaaccctctacagacagacaacatccaacagcttgcaacccctgtaccaggatgtgttcaaaacctgacttgaaggtgagcaagaggcccactgtatgcaccatggtgctatcagcctgggcagtgacagccatacccttgccccgccctgagatgcctggtggtgtgggcccaaccattgcctcacccatacccacacccaggcccctgccaggggtggagggcaatggcagaatgctccctccctcaatgtgaccaggtcactgttcaaggttgaaggcagcagcaggggtgagtgggggagaccacccaggggataggggtgagaagcaggcagcagagagccatcctgggatgctgaggaggaggtgagagtcagggccacacatgagccgaggctgcaagccctggcacattctccactgtcccgtcacccttctcgtatagaacacaaattcaaagaggatcagcaagcatttcaagacaagaaccccagcagtaagccccaagctcaaggcccttctgagtgtgggaccctgtattactctacagccatgcacccgtgggccagccctggctgcagccatgaacagagggcccaccagcatgggtgtgtgaccctctcctgtgttagaagcatctctgcagtttgagcagctccagaccacaccaggtccctgttgtcctcttgctcctgctgctatggtggcaccatcatttgaggtcagggaatttgcacagtagtccctgcctgagagcccccttcatcttcagagcctagagtgggtcagagcccctgccagccagcctgcacaggtgtgaagccctggattgcttgttaagatttgggaggaataaaagatttcttaaatttccacttgagattatttaatcacaagtgtggtttgaacaaaaagtaaaacctgaatatgaattattttaaaattgaggtataatttacatacaattaaatgcatagatttttgtcaatgatattcagcacatgtatacaccatcactcaatcaagatataaaacattgctatcaacctagaaaatgatctttctagtcaaccctcccattcacagaggcaagcactgttctgatttctagcatcgtagattagttttagctatttttgaattttatgtaagtggaaccatacagtaaggaaactttgtggcttctttgactcaaactcaatataacactgagttttatccatgtagctgggaaaatccattgctcgttcctgttattgctaagtagtattttattgtatgactatatcacagtttgttttgtgattcctgttaatgtacattaggttcgtttccatttgggaactactatgaataaaacttccataaatatttttgtatgtgtccttttgtgagcatagtctttcatttctcttggatatatacctatgagtggcaaataagcacataaaaagatgttcaagatcatcagtcattaggaaatacagattgaaatcacagtgatataccactacgcatttagtaatatgccactaaatttaaacaagttgaaagttagcagactgaccatagccagtgttggcaaggatctgggagaaccagaacattcataatctgctgacgggaatgtaaaatggtacaaccactttggaagatggtttgacagtttctttaaaaagtaaaccttttacttttaccttatgatccagccattctactcttacctacttacccaaaagaaattaaagcatatatccataaaaatacttgtacatagatgttcatagcagccttattcgaaattgtaaaatattagaatcaacccaaatgtccattaacagttgaatgaatagacaaactgtggtatatccatatagtagaatgctactcagcaataaaaaggaatgaactggctgggtgtggtggctcacgcctgtagtcccagcattttgggaggccaaggcaggcagatcatgaggtcaagatattgagaccatcctggccaatgtggtgaaaccctgtctctactaaaaatacaaaaattagctgggcatggtggcacgtgcctgtagtgccagctactcgggaggctgaggcaggagaatcacttaaactgggaggttgcagtgagccaagattatgccactgcactccagcctggtaacagagtgagactccatctcaaaaaataaaaataaaaaataaaaaaaggaatgaactattgacacatggcaaactttaatgaagctaaaacctatcgatgtattctataacatgaacgaatctcaaaataattatgctgagtaaaacaagccacacaaaacaagagcatctactacgtgatcccatttatataaaattataggaaatccaaactaatgtctgatgacaaaagccagatcagacttgggttggagggacagggaggggcaaagggagggttacaaagcggcatgaggaatcttgggtgatgtgtttgttgtcttggttgtgatatggtttcatgggtgtacatatatgtcgaaacctttcaaattgtatgctgtatataggtgtagttaattgtcaattatacttcaatgaaggtgtgtccttaaaagtcaaatgactgtatagtataatgctatttccatcctctcagtcactctccttattcaagtaccacatggtcttattttttgtagctgtatagtaattcatgagttaaggtagcatttgttctccaagcttgttctttttcaagattgttttgcatattctatataaagtttatttccttatttctataaccatttccatataatttttagaatagcttgtcgatttttttcaagaagtctggtggtattatgaatgaaattgtgtcaaatctgtaggtaaatttaggaagaatccacatcttagatatattgagacttctaatccgtgagcatattgacctgtttcatgaattatgctttttacagaatttttcattttatctaatttgtcaaattattggtgtaaaatttctaataccacctaataatttctgatgtctgtaatagctatagaaatactctttctttcactcctgatatcggtaatttataatatccatcttttttcttcttgatcagacttgctaagaatttatacattcataatttttttaaagaaccacattttagctttgctgatttttctctattactcgttttctagtttagtgatgtcttttccttacttttgttgtttgtgcttccttttggtacactctttcctttttctttattcttgaggtggaaagttagttcactgtctactgattcctgttgtttctgatcataagtgaaacctcttttttttttttttttttttttttttttttaagatggagtcttactctgtcacccaggctggagtgcagtggcgcaatctcagctcactgcaacctccgcctcccgggttcaagagattcttctgcctcagccaccctagtagctgggattacagttgtgcaccaccacgcctggctaatttttgtatttttaatagagatgggggtttcaccttgttggcccagctggtctcaaactcctgacctcaagtgatccacctgcctcagcctcccaaagtgctgggattacaggtgtgagccaccacacccagctgaaacctcattcttattgttcccctgaaaataatgtgtcttttcttcctctggctgcttcttatgttttctcattatctttggttttcagttgttagataataatttgcctttgtggtttcctttgtatttattttgcttgaggattccttgcttcagatattgagttgtctttcttcagttttgtaaatttttagccaatatattttcaaatattccttctgccctattcattatctcctctccttctgaaattccaattacatgtatgttggtcctattcttattgtcccacagttctctaatgatctgtttaattttttttttcattcttttttctctctgtgcttcagtacaggccttttttattattgacctgtctttgaattcattgatccctttttctgctatgtccagtcagctcttaatcttatcgaagcccattaatcctttatttcagatgttgtatatatcagttctactaaaggcttgttcttctctggaatatgattgacttagacatatattccttcattactgccccatggcttttaaaaagatatgaattttagtttatttggcattttttgttatgagaacaacaatctttttcaaacttctgtatcctagttagaagtagaattctgtgtacgcaattttggatgccctattttttcaagtatgttcaatattattggaaaactgcaagtacagtacacagaacttccccacatcctttacccaaagacctcattcaaatgttgccagctgtcttaatatgtcctcgatagaaagaagattcaaaccagagcactcattgcacttagctgtcatctgtcctcagcctacttcaattcagaacagtgcttgagtcattccttgatctttatgtccttagcagtttttaaaattacaggccacttatttctattagagtttgtctgatgtttcttcatgaacttttggcaagaatattactgaaattatgccgagctcttctccccacatcccatcaagtaggaatttatgtcaactggtgacaccactggtaatgttaattttgatcacttgagtaaaatgatatctgccagctttctccactataaacttgtcctgtttttctttaaaattaataaagtctataaaagtaataaatgttttcggatgagatactttgagactatgtaaatatcctgttgtttctctttcacccgctaatattaacatgtctcaattctgtaatcagaattaactagtactgtgattgccaaatgaaaatgttcagttccatcatttcttctacatttacaagttaaaatttactgtaaagaagagtttctcttgtccccatttatttgttcactttttaaaaatcagttccaccaaattaacagaaagctattacccattacgaccttacgattttcatgcttaaaatgtcccagacttggccagtaggagcttcttcagactgccttttatgtcctttttgatgcatctcatgattctttaagtgattccttactttctggtacaagatgttctaggctattcttattttttccctgccccttccctggaacaaaccattttttcaaagagccttggttcttcttagtggtgagctattttgagaagcaaagatgtgagcgttaaacgtgctccttgctattggggttttgctgcttgcagattctctctgaaagcggggtaaggacctatgtatacatagacacatacacatgtatcttgagctataaactgtgagttcacttcaatacctccaatgccagtccaaccacagagttcattctagtgttccctcttttcatatttgtaattctcttcttccatgaaaaacctagttcccactgtcctcaatatatttatatactgttagattctcctgcatataagataacctcctgcccctgccacgctgccgcaccactcagccaccttcctgcacctaatcccaccttgccaccacctgcctcagctgctaccggagaccgacaaagccaccctcccacttgtgatgtccctttcctcgtggtggctttgacccccacttggccaccaccatgctctgccacctcctctttactatgactttttgaagataaaacatagttagaatctcctctccttggaattaaaaaaaggtgaaagtcattcttatgtgtttagagttgaaatctaagtatattaacaagaatcaaaaataatttagttttggttaatgtgacctgctcagaagaatattttgatttttaagattgtctaattttgccaccataagtaagactgagccagtacttagaatgacttttgtccaagctttaggtggaaatacatcaacgacagtggagggtaaagccttcactttcggatgctaccatctcaggagagccggacagtcaaacaggcttgtcctgaccaacatagatgagagatcagatgacattataggtcgagacccacactgtggtgggcctgcctaaagcaaggcattgcctgctcagaagatacttcaaactcaactcagtcttttgatttcttctatcagaagtggctcaaaaggaactagtcactgaccttgtatttgtagccagccacatctacatatcgaagaaagaaagtactgatgctaagggcttctaagttgggtttggaggtggaagagaggtgcataggttattggtaacaaatgtgtccatttttttcctccattgtatcccattaataggcttctctttattgtttaaattcctggtggcaggagagtttaaacttgcttttaacatgcaggtgggctcaggaaaatgaaaataggctgtctggcaataacccaggctcctagggttcttctgcaataggaattgttcttgtctcttctccaaagggctaaatggtgccgtgttgaaaataataccccggtatttacctcgaagtgtttctttaattgttggattctgtttttaaaagtcataatctgacttttgcctctggcaacatagcagataaatattttttaaaatccttttaaacactgatgtgcttggtaagaaaataaggactacctagaggctaaaaatacaagtgaaatcaggaatccagagaggtaagatagctgtgagactgactttaccttgagggcttttgccaaactaggtgaacgttggttttggtttacataccctccgtggctcaggataccaaggacaaatcccagggtccttccgaggtaggcatatgtggaaggttcccactcccagtcccctatatatatacacctgggcccctcaagtgctatatctgcagtgtaagggtgaacaagaaagaaagaaatccacccagtcccaaggactggcaagaaaatgttcctgcctcaaatcttggcactgagtagacagagagaaatttccttgaaaatgtataaccatagactgatcgccagaaggaattgtagctcatatgcaaactacctgagtaacctgaaaaatctcaaacataaaatttagtttaacccagaatggtggagtccttgggtgcccggcacaatcaagaagagcctatatccaaactatatctcaaaaaattttcacagattatattccagaaaatgtgagctcttttaaaaagaaatcaaaacaccaaaaggagaatgccatgtaagaaccaacaaaatctgtgaataacaaaatgataccgaatataaaatatgtatatttaatattttttaaaaattaaaaatatgattgaaaatcaagagattatacaaatggccaatcatctttatgaatggctaaaaagaacttctgaaaattcaaaattcaaaactcagtggaagagtgtaacagtaggttagaaatagctgaagagttaatttaagagctggaagacggatttgaaaaattatacagaatgcaacatagaaaaaccaaagatgggaaatgcgaaagagataagagatacttaaatagaatgaaaatttgtagcatatttctaattagaatacctggaaaagagggagaaaaataatggaatagagataccatttaatggaagataggtaaggatgttcaagaactgatgaaagatagaaatcctcactttcaggaaacctgatgaattataagcagaataaatgcaaagaaatatgtgtgtttgcatcacagagaaattgcagaaaaccagagaagatgttaaaattatccagacatcaaaaatggattacctataagggaatgaaaaggctatcaggtaacatctcaacaaagccagagggcaggggaacaaaaggtttatcaagttgaaagaaaaaaaatacacgaacataagagtaattacacagcataaaaaactctttaaaattaggataaaatagacattttagacaaacataaagagaatttgaggtataagaaggaattatgaggaataaagacagactcacaatatacagtattgtcatatagttacgtcaggaaaggttctaaggtgttctaaggttcttcatggggagggttaaagtgttgattatagactttggcttaattatacattttaaaatttgagataaacagtagaagaataaaagagatatttaatttttatatgagcagaagaagaaaatcagggtgaagtatttgattcaaaataaggaaccaaaagagagaaagaggaccacagaaaaaggcaaataaacaatctaatataaactaaataaataacatgtttatgtgggggtactataaggacaatgaatgaatcaccactatatgcagacatgggtgtaactaaatatcgtgggagagcaaaagaagaaagtctctgatgagtacatagagtgtgattcatttatataaagttcaaaaacatggaaaacaacatactgcatagaaatacaaaggtgagataaaccaaaagaatgataaacacaaaattcaggctaatgacggtctctgtgtggcaatgagggaatagaactggagagggacacatgggaaaattcaaaatgaaagacaccgttctttttctttaaatgaatggattcatccgtttgttgtacgataatgcttaagccatccatagagtggataagtgttcttttctgtctactcattatttaatagaaataatttaaacatttatagttattcaaatttgattttttgtgtggtgtgaaataggtttccaatgttgtttcattctaggtggatagcaggttgccccagcatcatctatcagagagctatcattttcccattggagtggtaactcttattatacatctaattttcatatacattggcatttatttctggatcctgttttctattttattgccaaatctgcagtcactgatttgccttttcctaggttgatctcatattgattttatcacagcagctttctgggttgaatgttctagtatctgggaaggcacatccccctacagtattctttctcttattttccttggttatctgggggcacttattacttcaaatgaactttttaagatcatttcatctaagtctaaaatgattgcattaaatttgtgtatttatgagaatgtcttcctacccacgaataagcaatgttccaatcttattttatgaccttcaatagggttttacagccattttttatataggtcctatggctttcttgtcaaatttgtttactaatattttatggtttttaccatgattatgagtaggtggtttttccgtttttcacctctaattatttattgctactgttgagaggaatgattaattttggcatatttatcatctgtccaactagtttcataattctcttataattttaatattttttcactggagtctcttggatttctaagtatacagatacataatcatcaaaaagagatcgttgttagctgtctttcttttccaaatgttaatgattatttcattgtcttgtcttattatacttcctttatgaataagaatgatgataacaaatatccctgtctggctcctgattttaattggaaacagttagtgattggctatttaaggagttttcttctatttctttgtccttagagttttaaatggaattattactgtattttaagactttctttatttctattttcactctaggttttgagatatgtcttcttcttgaccttggaagactggagtcttaatagtgaccattgtctccttaaattgccctgatattcttaaccttggaagacttgacatctcaatagtgaccattatctccttaaattctttcctgaaattctcctgattttcttgttggctcaaaaatcatagttcccccaaaagccttctttgtgctgtgcttgattctcgtggcattttggtattttgttgtcactatttaaggtgtcactcctcctctgcagtagctgtaattctagtcattttttcagaggctggagctcccagtgtatatggttcttttccatagcctgtttgaaggcaacactgaagtaccttaaggcagtggtggtctcacagagagtacctgatagggcaattgctgaccctgtgagcttctcatagaagtagacaggttgtcaggccccagtggagacccctggtctccacatgctcttctgtactcaggggtagagcagaccagcccacccatgcattcaggaaagccagcttcccagaaccctcaggcccacctgtcagaggcctcagccactgcttggctcggttgagccaggggattgaagttgagaatagatgaaatcagattgtccgatattgttactaagctttgtcttgatattatccagtgcatgtttttatggctgataatcccgttgagagacaagggcagatccttgagaggagaaattgaaatgctcctgattagaaaatggtagttttctgtgctaatattagatattttaactgagccatttttttctttaaaagtagaatgaaggagaaaagcatgttgttattgtgagacacatctatgacaagtgatccaaccaaggcaaggtgcggaccggggcggcccttgtatggcaggtaaagggccctggaagaatttagctccccatctgtgctggcaagtctccaaggataaagtgacaaggagcatcacggcggctcacagagtaactccacagtgattcttgaaataattggaggcagcctggggtgtcacggccttgaatcattagttggtggaaaagcaggaaggaacccacgtagtggcgcatcagcgagacggtgcagaccgtggagagcagcaacatctggtccccttggctccaagacggagggagcccagaggagctggggaaagtgacaaaggagctaagtacctgaaggaaaaatgagggccggtgacagggaataagacagatgcgagctgaagaggctttaggcaaagaaaaggaactcgggggtaggaatatatttggaggaagtgtctaaaacaaagccgttttgtaaaagaaactctcccaagggcagaaatcgtattgtacttgacatttttatgcagcttttcttcccaagaaggtctccaaaataacccttcaaaagccggttgagataacttgataggacaaatagagggaaaagaaaaaggtttgtgcagttttattgtagccaaaagacatccaagttaaaacacaggctctgatgtacatcctcaattcacagatgtgggataattttttccatctcagggatctctatacagccctctcacgtacccacgaggaaactgagggttgcatgtgaaagagacacaccttgtagatcccaggtcgctattctcccaccgagggctttctacagtctccactctttccactcaatctgtgaccatgtctgtttctgtaaaaccattgatggattactcagctctctatccagccagtcttgggtctctgcagcatcttcatcagattcagtcctccacccagcccaatctgtgccaggcctggtgctgagctctgaatgaagtggagcctggtcccaaccctgaaaccacagacactgcctgatgcccagcctggagttctgagcagctgtgaaggcgctgctggggccctgcctcggggcctgctgttccgtctaaggaaccacaggagcgggggtcctcaggccagcaggttggcagcctcctttaggtggaggagatctgggagggctggggggaaagctctggaaatggtgagtcaggtagcttcactattgtcacagacagcagatggggagatgacacacagtgcaaagggctcccagaaggaggagaaaccataggacctgtctgtagcaggtgagcctgagaggtttgcaagatacgctggcattgggcccaggtcaggggatgcctttgaaactgtcaccagggttcctctggcaggccagcggccctggtgactacctgacactgcccttaggtgttgagtagagcctgcagtttgtgctgtgagttagttccagtcactttgccctaagaatgtataatttcagactcccctaccttggaagccaggcggagtttataagggtccagtgaagccctggcgcaagggaaattgcaagggaagcatttcctttgggtattttgaagcatgctattttgcatctgcctttttaaaaaccattcaatactttcagtataaatatgttcacctttccattaaggctggcctcccgaagacagcaactaccccacatgttcatgcacttgaatcagtaaaaccaaatggctactacttttccagtcctatttattcaacctttcaccaattcagtgtccgaattgagcacttactaagtgcctagctctctacatgaattatctcatgtaatcctcaaagcaatcctgtaaggggcaatcccgtaaggaccattgttatcgtcacttttaaatagggaaaagaaggtggaaccttgcctgggctcacacaactatcagctgtgaaggagcacaggactgggtggaggccaaggttttactgtgttactgtgttacttgagacccagcgggatcaacacaagtaccgtaggaagttctgttgcagcactccccctaccccaccccgcccccgctccacccccgcctcagtgaagaggagctgcatcctcagctcggtcagctcccccacagcagcgtggcctctggctccagccccttctccctctgctccaccaggggactttcccaggagaaagttctctctgtctcagtaagtctcagttaagtggcttggagcctcacgttcctgcctttctggggtctttttgtgaggctgggggctctgaaggaagatgccccaggcagaagaaagagatgagagtccttggcagctccctcaggtgacgttggttactgcagggatttgggtggtattgagaaaattatccaaaacttgggaataagggaaaaagagggtggcaagtcctccctctgggaccttgtttactagatctgcccaaggattacttactgatccaggctagagggttacgtctttgttcaactcacaatttgccgctgattaaaggcccagactgtgcagtgacatgttaacttgcacatttgttcccagtaaaaatgcacatggttctttttggtggaaaagagaacccgaaagtttgtggttttcttaccctgcagatcactcacctactgtgtgcctagcctaggcatctcatcccaaccttctttctccagtgcccatgtggctcctcaagtcctcctctgaatcagcgtctgcactgtgggctctctcattaagaaagcaaacacagctttaacatatgctcactttagattatcgtgacagtcacatttttaagtttttgaaaagtatgctttggcacttgtgtttggtgtttgatcttcagctgtgaccagaaataaccacctccaaaagccgtgcccagggacattagacaatatgtagaaacctatttgtgctttggtttcatacaaattggttacatagaaactcttttggcagaattgacaggcctcctgacagatgaaaggtgttccttctctcttcttgttccaggcatttctgactttgaagtcaatttgtcagacctcaggttaggatctgtaaacattatgcatggcaggttgcattaccttccagcaatggataaccatgtgtttctgttgagctttgggattggagaatgtggtcaagtctttcagaactggtcaaactgctttcatcaagtgcacaagcacctcagcatacaggctgtgctcaccggttgagtttgaaatcacctgtggtcactgagaatacatcacatctgcccagcagtcacctgtccagtttcaggcaaaatagcaggagaggagacagggaggtgatgaagatggaaacatcatagtgggaggtaaggggcttaatggccaggtgtccatgcatgacaaggagtgggtttgggcctgtgatgttcacagatccaagcagggcttccttctgcagccctgtaaacctccagcctttagagaagttgctacttaggcctctaagctatgtgtccctgaggtgggtgaggagcagccatcctgcaggccagggttgctgatgtgtggatgtatcctgatgttggagaagctcacactatggacatctagatcctccaggcatgagttccttgaacttgaagcagagaccatatcaccagctgagcagattatcccaagttcaagggatttggagtgagactgattcaaagctaggctctaccacctacttgctgtctaaccataggcaagtcacttgactcatgtttcctaatctgtaaaatgggcatatattcatgccacaaatatgtgctgagtagggcctctgtgtctacttaatagagctttaaggaggattaaatgagcatcagatgagctcatagattctaagagtttagcatggtgcctggtgggcctgcctcagtaaataatagtcactttacacatggccttctctggctgggtgttaacacacacatgtccttgggaggaattacagattctcatcccaacccttgaatataaatgaggcgttacagggtggaggtggacctgacgcagccccggcatccagggcatctaggagtgtggaggccctcaccaaggtagcctgtagtcagagctcagagagggctgctctcttcccaccagcagccctgaggggtgccgagagttttctggcctctaagaggatagacctctttcagctgggagggctgagtggtgggatggcagggcctcaccccacttcccaggtgggacagttgggcagggtgaaactttgcatctgcctcacagctccctgcagactgagtctgcctggtgatgtttaccttggagcagggctttaggagccaggcctcttcttataccaggcctcctctccctgcatgccaggttccagggcacccaagggtgctccactctctccttcccccaggtctctgccatcttcaccgtcaggtctcaggtctaatctcacctcctcaaagaggcttccctgaccagagtaaagtgtgcccgctgcagcaccctggttatttccttcctcgcatttaacaccatctacacttgtcttgtttttttgtttgccagttcaccctcttgtgtgtcttcctacactgtcatgttagtgccctgaggataggagcctattctgtctgaatcctcagcacctggaatcgggactggcacatagcaggtgctcagtaaatatttgttgggtggatagataggggaggagctggcaggcaggaactgcggaagtgccccgttgttaccacccaccccatcttagggtagacatggcacgggactggagcgtcgggcctctgcctggttctcacacaaacctgaattctgcagctgcataccaggcacttgggtggtttctgcaatgagagagtcgacactgacaggcactctctgtccctggaccaccttgccacgtgtgagggtataagttatcttaaagcggggaagaatactgggaccgttatgtccaatccctggatgcgcaccccacatatctgcacatggctacatgtacatggctcttccgcaggcaaagcctcgctctgggtcattgagaaacccaaccatgaccccaggcgagggctgccgctcccctgtgtgttggtgtgtcagtacctggaagataaagtatataaggccatgtgtaagggctgtatctgcccatgggcaggcacttggctggacaagtacctctgtctgcagaaggtggagacagctgctgtactgggccagggttcgtggcaggtggcagatgaggttcttgaggttcttgatgctgcacacactgcctctggtcttctgcattcacgccttgctcttttcagccagttttgggctttccagtgactgcctcctcagagccaagccatcacctcattgaggcctcatagtgagttggggtgaggttgtggaattcagtgctaggtcgtgtgctgggggcactgacagccttcaggagcaggcctaggcagaacatctggctgagatgggagcagggagctcccaaggcctggtcaggagagacagggctgtcatcaatagtcaagctggagatgaggtctgagacacagaaaagctgtgttgggaagaacgtgccagcaggccgctggcatccaagagtggaagagctcgtgggttttccctcactgccacttggggcactgtccctgagaagggagcactcgttagttttctttgggcccaggaagcggttacagaggctgagtcagtatttggaagcaaaattacccaactgtctgtgctcttggttgtggctggctgtgggagaacaacggaggggcttcctgctccatgtggatgtagactcactctctctggggcccatctcaggactcagcctccttttatgccttccaccggggtcagacgggcttgccttccacaaccgctcaattacaccacctgtacctatctatgctcccagttcatggcagtcctgggtctgtgacattcttattgaaaatccttattcagatcacagagggagtcttcagcaccaactggtaccaatagactcatttctcctgccgccataatgttaatgtaactgttcccatttctgaccatgttcagtaaatttaatttgtgttggaaagcagcttatttggcaagatgatcagtttttaacctgagtaaatggctttcttgatgactataaattaagcccattgtacttttcatgcattgtggttgtcctcataaatactataggcagttgctggtagtctcacttggttacctttcccattactgttttatcatcattgtggtaggagtggggaattcattctgttttaatgacaaggaggaagtggtaacaaggggcttgtttaatgaggagcccacccctgggtcagcatctgtgtagctgtggatcagattctgggccttaccccgcccggggtatcctcagccctctgtggggccattgtgaagggcatatgcagggccttcatgctacttttgtcttaattgcaagtaatcaggaatcaaatatttgccgacagccaatttccatgtcagggagaacctgagtgttcttgacaacttcagcagccacaggttggcaccagtgtttccttaacactgacccctcagagtgcagcctgcagggaaggccatgggagcctccccagcaagttaagcaaacgtaggtgcctgctgccctgtgtgacgctgggcctcagaggtgctcactaccatctggacacacagctttcaaaggagggggtcagggaaagtagcttctccccccagccccccatgaactggctttggtttgcctgcctgggatggagtaggtggtctctgaagccccttccaactctgcttctccaggattctagttctctttactccagaagacccacctccacggacatccatcttcccctcatacctccatccttccacttccttcctgcccactttggagaaggcaagggaaaatgtacccctaccgggtcaacacatgtgaggcttcaccaccctccccatccgagcccctagcctggcttcttaactgcactgaattagccttcaggagatcagttctgaaaatttctgcatttcttaaaacctgagtatactggggccacacgaggagcaaggcctagcacctgtgggacctcctgaggccagagcagggcaggcactttggggtaggaggattcagagagggacacttggacttgggctggtagcaagcacttcatagagaaaatgcctacaacagtgacttggagctggtttagccagagggagaaagcaatgggggccagggcacacgctctgaagcaggctcggagaggccagggcacagagactttgcctcttgtttcttcaaaatgggcaattagtgggttgcatcctatctgcatgggaaggttattaaaacagtgatcccatggcaatgctctgcgtcctggccctgtcttgggagagaaacaaaggctgatattttcagagctgttagtttcttctagtaggcgccagcactttctagggtaacccattttccaacaacccaggagaatcacgctaatcaaatatgctccatggcaaagcggccataaacaccgtgagtggggggcctccagcccagagcctccctgccaggcgcctgcctgccttccgcctccttccctccccgccaccatcaaccttgacaggaaggcgtgcagaggggccgctgaatgccactgggccttcatggtgacatgcgaacaattagcaaagtggataaaagagattcccgcctccttaggatctgcacttttatactgctcagagatatttgaccttctagtttattatgattcaagaaaaagtcaatacttcttagtttgccaaggctggaggaatttaaatgaattattgaatcaagcagttaatctgccgataactgattttttttcctttcaaatctgtaatgatgaaaagcagacttaaccaaaaacaagaaaaatatatttttttcttttttttttcttcttttttgcttagacattttaatcccatgggtaggacccggggctaaaagtttggtcatgattactagggccattctgtcttgctgagtattttgatggagatttaattaacacttaaagcaaagtcttctgaggctgtaaaaatctgtattcacatttcagttgtcttttggtgtccctgtgtaattctcaactttccatctgtacctttagtgacatgtgctgattatctcatttccagactcccagaatgcagtgtgatgttggtgatggacgcctgtttcgcctttcacttaaacgtgccctttccagctgccctgacctctttggtgtgtgagctctgggtgctgctgcctgagatcactgtgggtgttgtagggtgcaggggacactcaagcaatgtggcagcgcccgtttccaggggctcagccttcttgcccataactgcaacattgtgctagaaaggactgggctgtggggaaaggctgctggtgtctcccctgatgacgtgtgtcatggagaaccacattctcccccaaggaaatggccagcctctggtctccctacctcggctacccccacccccatcctgaacacttggagcatgactttcttcttatgccacgtttcctccctgcagtgactccccagtgcctacagtagtgtacctaaatttctctgcttggctctccaagtctcccagaaatcacaccttgacccccaaccccaccactgtacaaaactcctactcacatctagtcttctacctgagacctgcaaatgccacccacagggcggctgggggagtcttggctcaagcctgctgtgtttctgggaaaacctttctctcctttgcagggcccactggcacatcacccgctccatgatctccgccactcccagttacttcttccaaacttagctccctggctcccatgctctttgcctgatctgcatacatgtcaccaccttacagaatgacaaagtcagaaagagggaaaggtatgacttgttcatctttgagacccctaaggtgcctaagacacagcctggtccaaagtcatgacatagtaaaggaaaagaaggaaggaaggaaaacgtattgcaggcagggggtggaggggaccacttttttaaaaagtcattgattttaataggcctctagtccaggaggctgactgtgagcctgggagcagtagtggcaggctttgtccttctgtgtaaggtgcttctttgtgagcacggaatagctgggtgttttcatttttcaactggaagcaggaaaagtaagcctaagaaagaaccaagagttgatcaaaagcccccagctgggtcctaggttggaaaggtgttgtgtttcagatgttcagagtgagtcagccatgaaacctgagctctgcaaggcaggacacccttcttggcaccaatgaccacctcatggagggacagggactccctaggagaccccaagcccccaggccccaccttgagtagcttggctgcacaggcaaatggagtctgtgcttgtgagctacaaaggaagccctcgaccccagaccctctgagtgtttacagctgaccctctgtgtttgtgtgtctggcagggctttccagccacaacgagctgctggcctcctgcgggaagaagttctgcagccgagggagccggtgcgtgctcagcaggaagacaggggagcccgaatgccagtgcctggaggcatgcaggcccagctacgtgcctgtgtgcggctctgatgggaggttttatgaaaaccactgtaagctccaccgtgctgcttgcctcctgggaaagaggatcaccgtcatccacagcaaggactgtttcctcaaaggtaggaacagggcccttgccctgtggttttgggttttgtgatgggtcttccaatgcctttttgacaagtgacctgggtgctgagtctacaagttacatatgtttaggaaataaagacaaagactggtgtgtaacaaaatagcagcagtggcattttggtgatgcatactctgtgtcccacctccagagacccctgcccttagaggaagctccttggggagtagaatccaggcaggtcaaattaaaacctggctggtacaggttcactagggaccaggcaacagggcactacccaggtctccacataggacgggcctttgcaaggttgtgacaaggaccatgtttacccttctgcacagagtcccatgaatcaggaggctgtgctgtgcatagaatgtggtcaggcagacaccagcgcaatgtcttccagcgtgacaaggacacaaactctggcctggggcagttgttgatgggaaggcatcccatgtcttgcctgtccagaacacctctgagcaagacaaggaagcccctgcatggacatcagaacatgtctgtggagctggggccaaggattcatgctttaggctgagattgagtcagaaaagaagggaagtaccagctcccactagacggtaagaaccattagggcagcggctatggctgtcttatgcgcttatgtattagcacctagcactgtgccctgcaccaagaaaatgctcaatggctcccagatgcttgaagatacaagggtcagaatgcacatcctgggttgattgatgtggccctggtaaatagtacatgccatggcctgtggaagtatttattgtatacaaatatttgtgtacaaaatgggtatacatgaattaggaagtgtgtagaagacagaagcagcttgcaggcagatgggaacaggcccacatagcctgagctacgagagcccacttggagttatgtgaggtcaggaatgtgctttaggttgcacagggaggagaggaggaggcttggactagacacctgccaagtgcctgcaacactagaagacaaaggcgtgagagcagtccaggctgtaaaggcctgggcaccaagtgggaaggggcagagctcctgcctcaccctcacagaaccccactgaggatggtatgatgctgacacacctgagcggaggcggattcatggctgaggtggtggagcaaaggtgtgttggcctccgttacatctatctgtgtcacctgcacccacctaatgggccactccactcagcagtcgtggcagcatagagtgctaggcagggcagggcttgggaaatgtgcctttacccggtgatgacaatagtcttggacactttcacagctgtgcttatgatgctaatgccaaggtgcttcagagatcatgagacacattatggaaatgaggccaaaatgagcctaggaaaaacgtccccattctggaagcactgcccagccacgtgccgccagttcctctgcaaccgtgcacactaaaacacttgaccagttgctccagctttattggccgtgttgaattttatagactgatgttccattctctggtttccaatatccttcaaattgcatcttcctaaaggtttctatttctgcatcagagtgtgcacaccctccctcaccattggttattcaaacaacatttctcatttaatgggagggaaaaaccagccaccacaaaacccaccgaggtgaggagtgatggggacaagctggcgtggagcggggggcaggcagccttgagcagatcagggctcagttctgcttcatgctgattgaatttatccaccgaatccttctgactcattgaggttttcacacattgtgagttgccgcccacttggtatagcagtgctcctctcttaaggacccctttttggtggagagtggtgcctgtgagctcccagaaagaccaagggtggcatctcagttctggtacttcccagctgtgtggtgttggttgcatcactctgcttctctgggccttttcctcgactgtaaaatgggactaatggcagtacccacctgctgcagccatggagagaagtgaaggaggggctgcacaagcaccacttagcacgctgcctggtgcatggcatggatttggtgttcatgagacctgccatcattatttattctaatccagcgtggccacaggccgagagtagagagatgcacaaactgtgaagaacgcagaggcaggagcaagggttctgtctgggaggtttggggagagatttctgggcccagattatttaatggtagctggagagtgggtaaggaagacatgagtgtcaggcagacactcattgctggggcctctcccagcaatgtccacctagagccagggcttctctttctgcagatggcctcttgggtctggactccagtggaaagccttcagtgcctcaccctcagggtcagctgtagtcctggtgggagggcagaagagctgggctgcctctcctcgatcattcccatagggagtgcccagcaaacaggaaagacctgggcactgattcacaggagcctgacggatggaaggcaggccagccctgaggtgagtgccttggggtgagcacgtcaccttcaccagaaccatggctccaggggggagtagaacgaaatagatgacagaggctctgtcgggaacctctgtggggacagagggtcctggaacaaaggaggatataaagaacaagttcctacagtccccaccccacaatggcagcagaatatttaataacagcttgaggtccacgaatgacagtttgtcatttgtcccaattttccagggagttattaatacaggaaacaaaaaaataccttgtttttcatgcaagcaaaaattctaaaatcatccatctttcattctctatttctatcagactttacaagaagaagttgtgacttcattctctgggactttatctgtccccagaaatcaatattaggacaagtccttgtgcagctggagtgtgtggagcaagaggagagaagtgatgggttgtgctgggctaagctgctacagttcagagctcccgtctgtggccagaggccctgatttcctgtcagggagggggttctcctgaggactggtggggggacacatagccttcaccaccctgcaagggagaagaggcagcattctaaacccatttacaagaaaacttctggtatcacattccagttgctatggcaatgggattccttgtgaatataaaatgaaatatatcatttagggatcattagcatgtacgggaaatcaaccagactcaaaaggattgctgcagctagagtttacagctttgatcccagatctcctgagtcacaagcagggtctcactgaaagtctgggacaaaaggaggtgtgggaaagatgtatctcttcttgtagcaaaattagagtcacatttttcctcagcaccaaatcctaccaagagaatgccaagatattgggtggatttcactgtttaacttcttatagagtttgtgttttcaaagttatcttgtgacatcgcattcctatttgtgtattagttggcacttttaaactcatttttcttggttttgaattcacgctttatctcctacgctgttcacgaagatgagcttccctttcagcaatcactcaccaagccagcgttgtattataccagatgatacaatgtcatagttgggcagttttccaaacaaaccatgaaattatggaagaaaggggactgttagaggttctgttttaaggggccccttcagcttcctcagcctgcgggcggttgcaggtggatttgggtgcttcagaggggagttcccaacctaatgaaagacaggaaatcatttccatttttggaaacaaattaaacatactacaggctcactaagaaatctttttttcttacttgttactaagcagacataaaaactcagtattttgttgcaagttagcagagcaaatagagcttcctgccaaagagccatttttttcttcttcttcttgttattttgttgctgttgttgttactctgagtcttgttactttaggaatttaaattgggccccacacctccaggggcatttctatacttccacaagtattctctgtcctgccagggaaagcttcttacatccccagctttgtcagcccagtccagctctcagcgggagactcacttcctgggatgtgtgagatccagctgcagggctgtgatgctgtcaggcattgataggggatttagtgtaactctgctggagcagtccctatagcaagaggtgctggggcctgtggaagcatcagggaggcccaggctgatgggacaatgtggcacgtgctcaagggcactgctttggcacgtgagctttctgtgcctcatttacttcatctgtaaaatggggataataccagcacttacctcatagagtgttgtgagtatgacaggagcagcacctggcatgcagtgagcattcttctctacgcagtgtcaacagcactagggatgatgctggtgccgttgtaacatcacggcttattcaaggagcagatgcaacaagctgtaagacccttgcccatttatgtgacaactctgtaatgagctaagaggtcaggggtggtgggtcctcctgtgaatgaggggagagaagaacattggccctccatatttatttaatgaatgactagaatttgacctccagttgatcaaagttaatgatcaccttctctgtcttgctaagagatgtaaggagccacccaagttcatctagcaggttagtagaaaagcaaggggagaatcaggtatctctgatccccagtctggacaaagctcctagaatgtacctccgggctctcaggaaatgccagtggagcctggggtaagaattcatctgcctgaagatgagaacgtttagagaaggtgctggaggagaggggaccttcaaggtggattttgaagagcaagggaaggtttgctaggttgagagtgtggggaaggctttctaggagtacaggcatgaagtacctccagtctccgggaagagcaagtgattatgggatcctgggtgtaggggagagcatagttggggataaaggcagacaagtggatcacagcaagctggggaaaggccttgtgtgccaagcagggaagtctgaactcaagctgaccagtgttgtgtccagaattggtgggttcttggtctctctgacttcgagaatgaagccgcggacccgcgcggtgagtgttacaagttcttaaagatggcgtgtccggagtttgttccttctgatgtttggacgtgttcagagtttcttccttctggtgggttcgtggtctcgctggcttcaggagtgaagctgcggaccttcgcggtgagtgttacagctcttaaggcggcgcgtctggagttgttcattcctcccgctgggttcgttgtctcgcaggcctcagaagtgaagctgcagacctaaggcagtgcggacccaaagagtgagcagcagcaatatttattgcaaagagcgaaagaacaaagcttccacggggtggaaggggacccaggttgccactgctggctggggcagcctgcttttattcctttatctggccccacccacgtcctgctgattggtccattttacagagagctgattggtctgttttacagagcgctgattggtccattttgacagggtgctgattggtgtgtttacaatccctgagctagacagaaaagttctccaagtccccactagattagctagacacagagcactgattggtgcatttacaaactttgagctagacacagggtgctgattggtgtatttacaaaccttgagctagatacagagtgctgattggtgtatctacaatcccttagctagacataaaagttctccaagtccctactagactcaggagcccagctggcttcacctagtggatccctcaccgggctgcaggtggagctgcctgccagtcccgcgcagtgcacccgcactcctcagcccttgggcggtcaatgggacctggtgccacggagcaggtggcggcgctcgttggggaggctcgggccacgcaggagcccacagtggtggggaggctcaggcatggcgggctgcaggtcctaagccctgccctgcggggaggcagctgaggcccggcgagaattcgagaacagcccggtgggccggcactgctgggggacctggcgcaccctccgcagctgctggcccgggtgctaagcccctcgctgtccggggccagtggtgccagctggccgctgtgagtgcagggcccaccaagcccatgcccacctggaactcaggctggcccacgagcgtcacacgcagccccagttcccgccggtgcctctccctccacacctccccgcaagcagagggagctggctccagcctcggccagcccagagaggggttcccacagtgcagcggcgggctgaagggctcctcaagcatggccagagtgggcgccaaggctgaggaggcgccaagagtgagcaagggctaccagcatgctgtcacctctcagtgtcagataagctactgcaacattctcatttcccaaagagggaccgtgaagcccagagagggctagtacctgtcccaagtcacacaggcagagccaagccagggcccagcctttgctgctgtggcaggcccttcaaaggcacccatagctttgtggctgtttttagttagggctcagcaaggcatgtccctaacagatgcaattgctttatgcttcttccccaggagacctcctggtgcagaaggaaggctcaggagccatgggcagtggaaagggcctcgtgtgccactgctgggcggggcttccctgctccgcaggtcattaagaagccagctgcaccttctccagggaaagctggctcaatcatcccaaactcacagagcttctggacatcaggaaaccagacccttgtctcctttctaaggaaagagtaggaaactgagggatacccagaaggttaccaggggaacctggggtcaaaagcaggcagagcctctggggacaagcctaccttcagcctggtctggccttggaagctggcctccactttctctccagactccctttcctgtccctccagttgcccttccacttctgggcctacccacatttctgtccagtagccgctgttgttctttcagtctttgcaaagggatctctctgtccccagccctcttcctggccttcactttaagctccacagaagagggtttggctgttttctgccaagccactcaccttcacagacatctgttgaatgcccacttggtgctaaggctgtgccaggacctgaggataccagtatgatcagaacaccgggcctgacctcaaggaatttatagccaaaagaaacgccacacatctccaccctctgggttatcctttgggagctgctttagccagagatgcctccaagacctcaaggacaaacgggaatctttacagactgtctctcatgttggataccctctcctcactcctccgcggattctgtcagcatctgtgaaaacaactaggacttcactgaactgacagttcactcatagccccgtagtccagcatccctgggagctcagttgtcccatttacagtatctgcttccaggatcaagaaaagtgacctaaaacaaatatgtgtgttctttggatatttcctccaggttttatgcaaggaactgtcttggtgtgagcaccccgcaaatgtgcaagaatattatcagttcggcatgtgtggtgtgctccacagaactgctgtactttgaatgaattaattacattccagtaattaaaaattgctaagaagttactgagctgagtaagtctcgtggtgcattgatttcacttatggaaacaagctacagcctccgagtcccccacattgtttcctgctgttttctggcatcctgtccttctttctccaacccctcctttgctgtgcactcctcagtcccgttggttgctggcggcctagtctctctcatcctaaagcccagaggagcaagctgttgtcccagcatcctcctaggtagcctttcatctcttccctgtcaggccgcagagcattttctgcactggctgtctccacttctgcaacttccctgaattctgccctctagggtctgcacctagctcctgtcctgttacccctgccactgactttgctaagatcaccttacccttctaaatgccaagaaggcactttccaggcctggtcttgctgcatgcatccttcctgcagtgagctctgtcatcctctctgcaaccctgttccactgtcttctagggaccagcccccatccctctgactctccgtagacccctccttctcttgcagctgcttccaggtctttcccctggggctctcttctcacagttccagccatgcctcaaagacccagactgtcccacgagcaaagacccaaccatatcttcatccctgacctctcctcacgtttcagtctacctctcattccacctgggatggtccatcccaccatcatctcctggctggatgacctctatggcctcctagctattctctgagccccgggtcagatgcttcttcaaatccactttccatatggcatttagagtaagctttccaagatggaactttgaccatggtgctgtcctgctcgaacccttctgtccagttgttcagcaatattcatgtactatgcgtcagatactatttggagatgtggggacacagcagggaacaaaacagagcccagtccccatggcaggtacagtcttgtgggagaaacaaacagtaaacaagagatgaagtctatgtgatggtgacaagtgccatggagcagaataaagccaggagggcagttagccagagcctctgatatgagaagtgacatttgggcaaaggtctgcagcaggccggggggttagggagtgaggcatttgaatatctgggggaagagtatcccaggcagtggcaatacaaagtttgcaaagatcctaaggtaggagcttgcctagcgtgtttgggggctcacaagggggccagagttgctggaccagggtaagtaagcagagagaaactgagcaagtcggagggctgatggggttgatctccccatagggctctgtcggccattggaagcccaagttctttgccacttggctatattgcccttctcattactccgtgaggcccacccaaaagtggccttgatgaggggagggagtgacatggagcctcctccccaggcttctccgcaggaggctgtttgaggaaggccctgtgtggacaggaggggtgccggtggctcaggtgctcagatccatgtgagtggaccctatgcccaacactcgagaggtttcagatgatcaccaggagccagatgtttaattactggagcaagaagaagttgatttgggactcctttaaggttctcccctatcgtgccttcaattaagatcaaggcccccgtgtagcagccgctaaatgacaccatgtattgaatctctgtgctcaagcagtttgtctaattatctgtgtgatagactcagcagctgtcagaccagccacaactcaaatacgtggtctctgtacgcctgcctcaaagtgttttatgcccactagcaagctcaaggacaggactttcatgctcttttctagatatgggatccctttcaggttcctctgctgcctagtgatataaggcattgaaggggccagtggctgggaggacagtgggtacaagaattgagcagaggcctgggggctcggctgttccctccctcgccccagcccttgtgcctcgcatgatcactcagcctctctgcctgcttttctggacagggaagcagtgacccagtttgggccatcttctccaaagagagggaggagcacttgccactgtgtcaagttaactgaaataaatgagggggatcaggaggcagtgacccaggggagagtaaatgactgctcatctccatcagcagagagtgtcttcaggagtaaacacttcccagcagagcaggctcattggatgaaggaggaacaagaccacaccaaacaactgaatgtaaggtctgtggagttgagtcctcagccaggagaactgagggacagaactacagaaagctggggcccagccctgtacagcatcctgggtctccgggaaccacccatgcttcctgattgtaggtgagcttgtgcccagtcctgcacctgggtgcctcatgagggccagatccagaacacatgtattctccaggctaatgagggaagacagagcttaacagtgactactgagtttggacatctcctagagagttcttccctctgcttttcttcttgttgtgctcatttctgctttgatgcattttgatcacttgttaatgaaagtaatcagagtgaaaactactttcaaaaagctcctctaaaggaaagtagcaaaatcactttgcttgcaggtaattaaaatagccagatgcagtgaactccgtccacttattataagcagggtgatctcagttgtgcacttctctttgtagctggaaaaaagggctcatccagggacttagcagccatgtctcttttcttgtcttccttagggaacttgtgctttctcttccactgcttgtgttcagtgcactccatgcccccttcagttggctaaggtatgcccaaaggcctggtctacagtggtccagcaaatgcctctttgagcctttgcctccctcactcattcggcctggctagctctctgacttttcctccaatacacctgtacatctctgtctctttctgccttcctccaccccatctttgtctctgtttctcagatgctcatccagtgatccatatttccatcaaaatataataaacccaaggtatttttatagggattttcagagatctttacttatatccagtcaggtggagcttgtacagacccaggtctgcatgagtcctcatagctgagactttagtcttttccccgtgcaagcttgtccaatgatttggggaacccgagattagagacatcagaggatatgaagggcagaacctttctggataggtgggtgatggacaggaaagcaggggcgaggaagatgtctcttataaagctacaaaagaagaaataccctagacaaaggaggaggtttcagaaggggacaccagggtaggggcaggggtgtcagaaagggtcagtgacacatcatcctaattccgcagagagtgagcttgcttgttctccttcccacccacctgcagaactccagattttcaagggcgtctctcaactgtttagccatgaatgctggttacagggaagttaagacccctctccagatgcaatatgtcgtggcagtgaccatggatttagctgtaattccagtctggtcaatctcactgggctgcagtgagagtaaacagaggtgaagcctgaacagacctgtctgaacacgaatgaaagggaagctggcttctgcaacagaggaggaggagagcacacacttaagatgcagcaaaagagcatgctttggggaaaaattattacaagaaacagaagctcattttagacagcaactgtgttctactcccaatgcaagaaaacatgaactctgaaatgagataaaaaatgggattgtaaattggctgagccacagtcaaaaataaaatggaagctgggggaggtaaggaaagaatataaagaacctgaaatacaattgcagaagttccttctccacttcaagcagtcaaaggaaagattaaccatacagaaatcatagttgttccaatacagggaacaaacttgaaaaccgctccccaaatacaccgagaatgagaagaagatttaaaaaatactgtgggagaggatgatagttatgtaagacagagataaaagatttaaaataatagtgattggttatcttaaagacctcagagcaattcaaatggacacaataagcaaagagagatccaaaaaaataagtgccctatactgaaagatctatcaaataagtcaaaatataattgctgacattttaggttttgaaaaaaaaaattaaagtgatctgaaatatccagagagagaaaaacaaagcagacaaaaaaaaaaaaagtcctacctggtgttgcactgggggctcttgagtggtttcagctgaccggcttgcccaggggcagcttctccccttcagttacatttgtgtcaaaggtgagtctcagacactgtctggtaggaaggaaaaaaaacattctgttcttggacttttctgcgatattaagaagcaagaaggcaatgaagaacattggtagaattttggggtggtaagaccatgatgcaagaattctacacttatcaaatggtgatccatgtatggaaagaataaaaagtattttctgctgggcaagggttcaaataatacaccatccgtgtactcttggctgggaaaaaaagtgaaagatgaacccttcacattctacagagaaatcagagaatctgacaaagaggaactcaaggcttaggtgagcacagaggctcttgaaatgagaaggtgtctaaataactttttcaaatatagttaccaaaaattgcaaagggtaaatgatgaggttaagtgcgcttaattttcttgactgacttattggaatttcaacagatcctgcataatccttgactcggtatgttaaaaagcatacatgagggcaatattccatcagagcccagaacaaacctcatgcagccccagacaagtgtccatggctgttcccaggtgacctgggagacttcacctcctgccttcactggtgtatccagagaccatgggaaggatcagccactgactgacgtgttcgacctacggtcgggcctccccgtgccttcatctcggtggctagagtgtgctccccagaaagcatgcagggctacaactgaagtggaagaaaaccgcagcgggtcatagtgtgtcttccttgtgtgatgaagcctttgttcatgggcgtgtgtcagtatgccagtgacatggtcaggacaattgggaaggcctgaactattggttctaatgttgcagtcaatacaatgtgattaaccaattagagagaaatgcataagagccaaattctgttgccaagaaaaggcaaagaaggtagaagagctgccctgttaagagatagaggtagaagttcaacccccaaggcaataaagggccaccatgggacacagccttgcagaaaagaaggaatggccatcagggtggggtggataggatcatgggaaatacacattctcattcacggagaatgtgccaggctgccagcccaccgccaggggctgtatggacgtcatctcatgcactccttttcctagttggtgtttactgagaggcaaagagaagccagataactttcccagttactggacttgtaaatgacggcaccagtactggcacctgcccatcccctttcagtgtgtgtcagtggccactcccatgattaggagagatatttgtcagggagtggggcttgacctgaacctggaagagtgggtgggtgggacatgaacaaccaggtacagggcaggggcagcagcagagggaaagacttcatgcagctttgctgatgttatggctgcattccttcctcctccaccagacttggcacttgcaactgatcagacagcaggtacctaaaaactctcactcccctaaagggaaatgaggagaagttagagttaccgcagacatcaaatattgtatatccagttgttttaatgaaatgaatcacatttacacccatcttgtctttgaacttcagtggctgtctccacgtggctatgtgacgtgacaaccccagtgagcacattacaaaggaagaaagtccccgccaatgccacgtgaaacacagggtgagggcttcgttgcacaggaagaaaaacgtccatatttctcggtcacacctttctgtctctccacttctgcctgggttccttctcgccagtgtccccacctctgccccctgccaaatttcagtgacatgaagatctcgtttatgtgccaggcttgtctcaataaacattctcctagcaattttaaaggaacaaactttccatattaaaaacttttgtggttctcagggtaaacaactgtgggtatcaggaagacctgaagaaatggggaatctatacaaaaggaaggcaaagtccactgctgagaaatgtggtttctctctgtaaaacatgctgacagaagcccatatactaatttagagaaacagttggcacaaaacaagatgcacagttgagcgtgcctgtctagaaggctgggaaggaaagaacttgagtgaaggcaccaccaggattcctgtggctatagccccacggagactctgctggctgtgattataatcatcaagctttgcagcaaatgattgtgattttacacatcctaccctttttaaaaaaccagagattggatgagaatggagggcagggtaacaactaactcaaagagcccatgtgacatgccaggtccaaggctgagcattctgtgcactttctgttctttaattctgtgacagcccttcagggtaaggactgttattacccctaacttggcaggtgaggaaactgaggctcacagaggtttaatgacttgcccaacaccactcaaccggtgaggaggagagctgcaataaagactgatttgaaatgttaaatgttgtctttgctctgtctgctctgccacatctcttacatgtataatttaaaaaaaaaacacacacacatagtgattatcattcagcaactgggcagattgtgcctgcactctcacttgtgttctgaaggcaactttctgcacgtgtagctgacatgtgcccgtgttgttagccactcttgactcgacaaagaaattgtgatggtttttgaaaatctttgtttctttgttgtttttgttccttctactatgccacactgtctatgtatataatgattcctgtaattaaaaaaggaaggaggccttgcagtgagcacctgcgcagtctctccctttttcaaaattagcaaaaagccggggactatgtatggctcacctcagaggagccagtggacagggtgggctcaggaccgagctgctaactagatttgctgccagtggactcagcctctgtgcagcccatgttgggttctagggggaccaggagcctgtggggcagcccgagatggcagtcttggaaaaggaattcagggtgggtgtgatcagggatagagcttctctagtgtacatcacacaggaacccatgagtggtaccggcatgtgctctaaacctcatcctgcctgtttgttcacactcctgaggatagtaaagtagtggtccctgttttcaacactgcaccgatcaagtttcattcttgtgtttcacgatttcatagaaagatctgtgattcttgcatctgggccattcataccttggcaggattctgcaattccgcatttcattgcttcaacaaacagtgctgagtgcctgctgtgtaccaggcctagtcgagggcccggtggcgggggtccaagaggagtgtgagagggccctgcccatggggagctgagaggggacacacaccccctgcctattgtaaaccagggtggggagcgcgacaacggagcacgtccagtctgttatggaaggaacagggaggcctccaaaagggggtgccatctggactgagtactaaatgatgagaaatgggttagagaaagaggaggggagtcttctaggccaagggttaggatatgaagccagcatggggagccacaagccaattggtgtttctccaaatatagagtttagggcagagagaaagcagcaagggcaagcctggaaaggagctttggccaagctggggccagacctggaccatcaggttaaggagtgtggactttctcctggatgcaaggggaggcagcattctagggttttaaaccataggcctggtgttcagaaagatcacctgtgttgcccttgggacagagtgaccctggaggcaggggcccagcaggaggcatcgaggacattcaacaaagccacacagaagcctgaatcgggggagtgggcagaccggagaatcacttaggaaaaatacagtcagcaggaccaggcactgattgtgaaaattaaccatcacacctgcccaccccaggatggttctaactgccttcctccatccttagccagtcctcgtctaagcagaagtacaagtcatctcagcgaggcctgagtgaaatccttcaactgacaagagccaagtttcccatttgggctgggccctgaacagtcctgggaaagtgtcagcccttcgtcagggcgcaccctgtcaccaccccgtctggaaagcgggccactgactcagaaaggaaatgtggcttggatgccgaagtcagagtgtgattctcctaccctgtggctcagtccctgtcctggactatagatggatggagtgttgcactctagggtcattgcaccttcctttcctgagttgcaacctccacctccagtacgcaggggttccgcaggagggtggggaagcagcttgattccagaagtctttacctctcctcatccaccagcctcagaggtgctttctgccaatcacatttttcccagcagtcttcttttcttccaaaagcttaataatttaaacaatatccatttgaaattatatttaaacacttaaacaatgtaagatgcaaacttaaggggagaaagaccaaaggggaatttaggtgtcggatttctcagaacaaaagaacagtccacaattggagggagaggagtggcagagcacagaggctgctgattagatccaagtgtgcctcctttctaaggatacttttgtctgagaaatgcacgcctcgaccagcaagctgctgagttcaaagacatgggaatctgggtatttaatcaaccgccttggtgactggagcatgggggagcctagttactcctggaaatcggtaatgaaggctgcggcaggagacccgcctcttaataaggcagcagccaattaacagagcaaatgtttgaggtgtccccgccgagtgatgggatgtcttgtcttctcccagggccctggggcctgtcagtcagacaggcaggtacatgacttaagttaattggagaaaaactccttccagggaagtgggcactggtttgtcattcaatgggatggagatctggttttgacaagtacctttgcctgacccaggaaaggacacgtccttcagaaaggctctcctctcccccgaccctagcaccaccactgagactctctggttgggagtttctagccccaggaatctcaaagccaaagagcacagctgcgcatctgagaaccaagagaattttggcaggagaaggcgaacctccttcctgagagagtggctctccccaccccttcagatggtacctgggaagcacctgctgagcccaccagggtctgggctctggaatggccaggaggaagtgcaggatgtgggccacaggaagagctgtgactgggagacatttgaaactcagggtaggacaaaatcagggtgggccgggcttggccagctggggagtagctggtcatgccaatggagaggtcatttcaaaatgggccaaggagtaacatgtcagtaaagtccatgtgggcacgcagagcctgctccagccacctgaatatccaccaggcagttgcacgctctgttcctccttctcccaccccccttctctctctctccctgtctctctctgtgccctctttctttccctgtactcctcctcatcttctcacctcctatttcattttccctttccgtgccctccctgtgaggtctgacttgagtgtgcctacacatatctaaaacaagtgactgaaataatgtgtttctcagttaactgggagtatgtattacatggtgcaagctactagttctatgttgagggaattaagcagtttccctagcagagttgagacagtctgaaatagatgatcacccatgctccccagcatcaggggatgaaccatgccatctgaccgttcatggtcctgtgaatgctgtcaaccccacatgagccagcaagtttgtcttttattggagaaatccctctctccaattttccaaacaatcacagtctggattataagtaaatgactaattcaacaaatgagttattgctcagtattcttgcatccagtttaaagtgagaggaggaggaggaggagggaatgatgagaactaacaatcatcacaagtaggtggaaattattacccacgtaaagaaatggaggtttcagaggagtgttaggttatgccacagtaacaaacaactgcaaaacctcggcaccccagtaaaagtttctcactcacgcagtacatccagcatgggtccgcaggggctcagctcacagacccaggcccacatggccttctgcagtcagtgatgtagggaaggccaggcatctgagaaccaggaggattttggcaggagggtttggcaggagaggctgagcaaacctcctccgtgagagggtgtctctccccacctcttcagggggtatctgggcagaccctgctgagcccaccatggtctgggctctgagatgaccaggaggaagtgcaggagggggaaggggatgtgaagagggagtaaaaccccaaggtagagcctggaattgacacacattcacttaaacccccatttccttggaaaagtaagtcacacagccacagctaacttggctaactttctccttggaggacagaggccctgcttcctcatgttcctcctcagtccacggcatcccggccagcgtgtttaactagagtgagggctgagtgctcataggaacgcttgaacacacaaccctgcacatagctgtgtccacgtgcaaggctgacctactggcatattcatagaattggaagggaaaccacttggtgaaaaggaaatgtttttcttcattttctattatgacgtatggcatacagacagtgggatgaaaatgtgtacatgcagttgaaagaatgatcgtgaagacaagagccgtgttttaggaattaggctgtgctttagaaatgctccctctctcgtgcccctccctactcaacgtcctcctccctgcctggaggtgaccactgtccgttctgtgataatcatcttccagctttctttatagttatctaaatttatattcataaatgtgtctcaacatggtttactttctcttgtttttgaactccatataaatggaaccatgctgcgggtgttcttttcagatttatttcttacactcagtatctgatttgtaagactagttcatatggggtatagtcataccttgttcttttcattcctggatatccccttgtataactatgccacgatgtatccattctgctgttgacagccagcatttgggttaattcccatttggagatattccaagctgtgcaactggaatcattcttggatatgtcttcctgtgcacctgtgaaagtgttcctctagcgtgtactctaggcactgtacttcactctcctttctagatatcaccatactctttcccaaaattgttgaccagctttccttggaaacaacagtgtgtgagttcccataattcatattcttactaacacttgtgactataaaacccctttttgacaaaatgctttttctgcaactactgagggttttgccctttttcctattgtttattacggtaattgattttcatatgttaaaccaatcttacattcctgggataaatcccacttggtaatgatgtataatcctttttataccctggatttgatattaggtataaatttattttataagttatatatatatatgatatatattttatatattgctggatatggtttgctagtattttgttgaggatttttttatatctataatcataacggatattggtcagtagttttcttgtgttgtcttgcctggttttgatataaggttgatattgaagtcacagaatgtgttggaacatcttcccttctcttttattttgtggaagagtttatgaagaattgttattaattcttatttaaatgtttgatagaatttaccagtgaattaatttggtcccttgcttttctttgtgtgaaatttttaaataactaaatctctttacttatatagttttcttatttcttcttgagttactttcaatagtctgtgtctttctacaaatttgtccaattcatcaaagttgtctaatttattggcatatacttgttcatactcttcccttataatcctttttattttgtaaagtcagtagtaatatcatcctccttactatttttagtaattcgagacttctaaaaaatttttttgttagtctagctaaaggttttgtcaattttgttgatttttttttttgaaagaaccaatttttgggtttgttgagttactctattgcttttctattctcttttcattaatttccagtttaatctttactacttgcttgccctgcttgttttgggtttagtttgctcttctttttactatgtgttatggtgaaagattaggttattgatttgaaatttgttttattttattttattttttttttgagatagagtctcactctgtcaccaggctggagtgcagtggctcactgcaacctctgtctctcaggttcacgccattctcctgcctcagcctcccgagtagctgagactacaggcgcaagccaccacacccagctaatttttgtatatttagtagagatgaggtttcaccatgttggccaggatggtctcgatctcttgaccttgtgatccgcctgcctcagcctcccaaaatgctgagattacaggcatgagccactgtgcctggcctgtttcttttttaatgtaagcattaatagctacaagtttctctctaagcactcctttactacatctcgtaagttttgttacgttgtgtccttattttcattcatatcaaagtgtattttctcttgtaatttcttatttgacccattggttatgtaggtgtgtgttgtttaatttccacgtatctgtgaatttcccagatttcatttggatactggttttaatttcagtcttgtggtagatgaacatattttgtgtgacttcagttcttttaaatttattgaactttctattctggtctagtatatggtctgtcctggaaaatgttctatgtacacttgagaaaaatgtgcattctgcttttgttaaatagggtgttccagcgggatctagtaggtttagttgtatcatagttttgtcagtcttttattttcttgttgatcttcctagttgttctattcattattaaaagtgagatattaaagcctccatctattattgtcatctatttctttctttagttctgtcgcttttgcttcgtgtattttggggtttcttgttagatgtgtatatgtctaaaactattaaatctttcaaattgattagcccttttattattatctgtttatataacacctggttatctccagtagcattgttttatattaaagttaattttgtctgatattagtataactctttcagctttcttatagtttctttttccatgcttttacttgcaatctatttatatctttaattctaaagtatgtgttctacagccagcatatatttgaatattacttttttatccagtctgaaaatctctgccttttgattggattgcttaattcattagcatttaatatgtttattgatatagttggatttatatttgaaattttactttgcttcttatatgtctcatttcatttattcctctgtttctccctcagtgctttgttttgtattaactgaacattttctgttgtagcattttaagtcatttaatgatacttttcctacatttttggagggtgtttttagtgatttttctggggtttaccatatacatcataacttatcagaatttacttcaaattcatactaaaacttttaatttctgtgagatatagaaatgttattcctatatgtattttacactttacatttttctgctattactgttacacaaaataaaactatatatgttacaaacccaataatacatgttttaaatttactgatttaaataattttgtcatttgaagctgagggaataaatgagagcaagtatatagttatataatttgtatgttaaccttcttatttaccattgctggttttcttcagtgtttttgtagattcaagttatcatttgatatcatttccttactccaatacagttttgcacccacctacatcctttgtgctattattttcaagtatgttatatttctgtatgttataggcacaattgtacagttataaacatattattttatacaattgcttttaaaatcagctaacaagaaaggagaataaatgtatatttatactgtctgctataattacatagttatctttgccagtgctctttttttttggtgtagatgtgattaccatctggggtcacttgctttcagcctaaaaagcttctttcaccttttgtagagtgagtatgtagcaatgaattatctgtttttgtttatctgagaatgtccttattttgccttcgtttttgaaaagtggttttgttggatatacgattctttgtttacagttttgttttttagcacattgaatatgtcattccactgtctgctggcttctttagcttctgacaaaaagtcagctgttaatcatattgaagttcctttgtacacgagtaaaaaaaaaaattgttgctgctttcaaatttttctctttgtctttgttttctatatttttagtagagtgcacctggatctctgtgtatatcttccttgaagattgttgaatttcttggatgtactgattaattttttaatcaaatttaggaagtttttagccattaatccttcaaataattttctgttcctttctcttttctttttctggtgcttctactgcacatatggtggtgtgcttaatggtgtcacacatttctctgaggctttgttcattttttttttttggttcattttcttccctagtaaactagctgtcctacagtctagcttgttgctctcatggagctaccagcctcctcttaattacttaccaccaaaatgttcattgttttaagagtacttttaggctcaaacttcctcatactctgttccaaattcctctcagtcagagctctccattttaatggcctgtctcgccccatggccaaaatctccaagccactgctccagagtttggtgtgggcataatggcccagttctcttagaatgacaaccttagttgtaattctagcctggttgtcatggtagactctggtctctcagttcacttctcccagcatgaaatctctgtcctatgagtaaactggggtgagggaacttcgggtcccagtgttactgccctgtcacaccagcagtagagtctccatcttatgagtcagagctgagtggaagatgagagccccagactgctcagttgcatttgcctggaatttagtctccacagcctggagctggcagggattagttgtgctggcatcctgacctcccagggaaatattatataccttgactggaagctggggaagagggaaccctgtctccttggcacttccatccagaatgaagcttccttcacatttagctggcaaagagagagggagcaagcagatcatggctcaagtaagactcttgctgtttttactgaatttagtagattttctttttttttttttttttgagacagactcttgctctgtctctcaggctggagtgcaatggcacaatctcggctcactgcaacctccgcctcctagtttcaagctattctcatgtctcagcctcccaagtagctgggattataggtgcccaccaccacacctggctaatttttgtatttttagtagagacggagtttcaccatgttggtcaggttggtctcaaactcctgacctcaggtgatccacccaccttggcctcccaaaagtagattttcttgaataaatgtttcttcatgtgctataggtacttaggaaaatttccagatactttaaccggttgggtttggagtgtgtgtgttttttttaaaatcaaaatcatcatttcaccatttatatttatttctctgaagagcatgtctacagagttcgttatgccataattctaaaagcgggacccaatgtttatttttttagtctacctggatttaatgtgttgtgaatggtataatgcaaaggcctagttttattatttttcacatgaattccaattccaatttgccctaactccatttattgaaaagtctatctgttcccccagagatctacaatactgcctctgtcttgtagcaaatgtctgtttctgcaggagcatattgcagagttctttcttctgttcagttgatctattcctgcaccaataccacaatgtcttaattataaaagctttatatagtaagttctgatatctcataggacaagcccttgtccttcttctttgagagcactgaagctgtcttcaggactttgtatatgtttataaattgtagattcagcttgtcaagtgcacacgtgtgtatacacacaacctgttggaaatttgatttgtatcgcattgagtctatgggtaaattcaggaagaatcaacatctttacaagactgtggctttccatccgtaaacatagtatatctctccattacttaagtataaatatcaactgatgcaagcagtatgtgtgctctctaaggccatggatcttccagaaacttgtaatattttctactctctccactcatctcacaagggttcatatcactttaaatcatgtcaatgtgggaagaacaaattaactttagaggctattactgatcccaatgtgacagaaagccagatttctagacaagtagatatttttggtagttgcctctaatggatcaactatacccaacgggagtgagagtagaataaggtacatttttatcacaaagtagcacctactttaaagctcctccactgctttttactaaccagtttatttcctttcatgctttcaccaacactccagctgttttctgacaatggggaactagcatgaggcttggctatttcaatcaaggcaggaaaatattgattaggggtctttaaaagtaactgctgttgctttccttttattgttgtttttctgattacaaaggtattatgtattatttccagagaatttaggacatacagaaaagcacaaaagagaaaaataaaagtgatttaccatcagagagaaccagggataatattttggtatgtaactttagagtcttttatatatatatatatatatatatatatatatatatatatatatatatatgccatgcacaccctatgttttgggttttttttcaaaatagctctttataaatggatctctttatacaacagtaagtcaaaccattgttttctttggaaaacagcaggtaatgggtgctcaagagtgctgcagggaaagtgcagagaatcccttcaggagagacagaggtgtttaagttgagactgccaaccaggttatgcaccagctcactcctcgaataccacctactgatttctagatggctgacgtgaatttgattgcctctcaaggttccatccaactctaaagttttgggactccaagatttctgtctgatctgtggtcccatgtcacctaacactgtcataggcctgagttgttgaaatgaggggtgcttagtcagtctggtgctataacggattatcatagtctaagtggcttaaagaaatttatttctcacagttctgggggctgggaagtccaagatcaaggtggtagcagaactgtgtctggtgagggtcctcttcctggtttgcagatgaccatcttcttgctgtgacctcacatggtagagagagagagagagagatcatctcttcctgtcttttttttaaaagggtattaatcccattcatgaggactccatccttgtgaactaattacctaacagacacctcacctccaagtatcatcacattggagatttatgcttcagcatatgaatttggggagacacaaacattcagtgcatagttaggggtttttggtttgcttgtttaactgcccaccaagaatatgattggaaagttcatatttaaccaagatggtagtactgtcacaatttctttctagaagagataatattaaaagaccatttcatctgcacagctcaattccacagagaagagatggtgaactcaggcttgtctctggtaaaatcactgtgtgccctgggcccagaacccctgtgtggacccctttcctcccttcagctccaccagtacaatggacccttgtccagaaagggacttctcgtgaataaatttgcctccataatgaccgaataggagaaagttgcacatctaaccacctgtaattatcaaataaaatcctttgtgcccaggtcagtaagtctgagtgtgggcagttggaggaggatagggaagccaggggagggggcaggaggaccttcccagatcctgtgaaatcacccttctaagttaccactcaggacatggctagctagattaatgtggggctcagggtttccctgcccaagggacttcatttcaggtcaggcagaggcaagcagcttagccctcacatctgtgctgctgagtgtggttactgcaggagagagctggagtctaagggaagaaacttcccatgcttcctgaggggtggggataactctgaagctctgtgaccagttctatttaagccaacatagagaagggcatcatgctgctgaaggtagaggcaagtgatgcttcatcctgagattttggggaccattgctgctcaggtgcttgtgctgttcacccatcttagtgccccacccagggagatggagggtgcactgtggccccaacccagtctacatggactaggttatgatcaaggcttcccaagaagggagggtaggtttggtggggtctgccccaaacagttgttcagtgtggggccagcatcccacacacccaacctggtgttaagttatggatcagcttggccatgaagcagtatattccagctcactcattttcacattggtgctgccgcctgttcacactggttccttcttgtatgtgcatccagtggatctctgcttctacatatagctcattgtgcaaccctcccacatggtggtgttactcatggatttcacattcttactctcaggatgtgtttcaaggaagttaccctcggaaaaaactcttccaatccctataattcccacagtccaagattcaaggtgctgaccgcccacctcctgcatcaccccaaaaggcagtgggctggtggtgtcatgtcagctcttgttggctgcagagccctgggggctcttcgtaatagccgcaggccttcctggcagggattagaatagtccatttgggcttccttaacagaatagcaccaaataggtgatttagacaactatgaaaattttattccacctttttggggtggcttcttagccacctttttgttgcatgctcacatggcagagagagatcctctctcatgtctcttctgagaaaggcactaatcccattcatgaggctccccccacctcctaataccttcacgttggggatttaggctttaatgtatgaattctggggagacacattcggtccatagcagccagccatgatgttctcacaggtgggagctgctgagaaagcagctgtgacaaagaacatgaagaagcctgttacaaggagtcaccctccctctgggcacaattaaagcagagtgcccggcctgtatatgccagaaatttcagttcctccccgctggaggctcagttcgcaccataaaatgccacatttgatatgcagattccctgaactctccagagaggagctggctacccaaggggaaacaaaggctgttcagaatgtgtctggatccattcccccataagtgatgttaacactaaaacacaacagctctctttcatcgggctggttttatggctcccactccaagtgttgcttggaattgtggttgtcctcattggctttttactacctttaaaagttcctttgcagaagcctgttggctggcttcctgctgactccagggctcgttgtggaaaggcctggaaggttggcgactaggagccttgggccatgacccagtcctaataccaaggtaaacactgagctcagttatgtgttctctccttggtgtcacgtgcttagggggattctgacacacaggtgacctccagggggcaaagactaggatcacacacagtctaaaaactttattccacaggacaataaattttaaaaaatagatagatagatagatagatacatacatacatacatacatacatacatagatacatagatacatagatacatagatacatagatagataattcccctgccagtcctcaaatctcagcatgaagcattatctccctggcgggagaaacatgaaaactgtctccaaagctgatggccctttacctggaagtttgatgaggtgtgtttggcagccccagcaggcagatgttcggcctgtgggtgggtgacagggaggccaatttcaaatgccctgcttgtcagtgtcatggatttcaattcctctctcctggaagcagtttccaccataaaatggtgagccttccaacagctggggctgcctttgcaatgggcctcccggtgatgaagtgggcttcccgtccctgggagtggacaagcagcagccgaggctgttggggaagaggcggaggaatttctgccccgggagcgacgtctgacgatgaggagtccttccagctctaacagacagtgttcatacctcagtgtttttcaagccccaaatcagtttctttaatgatgctcctgtaacaaacaatgcccagtgatcgctgaaaccatcttttttcacacttcaaaagaatctgagaacaaaggtgaaaatgacatttccttgtctgccaactgatatttacgcacatgaatcatctgacacattccgcattactttacaggcacttcaaatggaggcttttcccctgggagctcttgtgttgtgccagacaagtggaggccctgtagggacactcagcggctctcacaccctagacaggtccgtcctgccaccaggagtcaggcccacactttccgtagaccctcttccctcatgcttgctttttcccatcctgggagttttagggacactagccatgattttaaatttcacgagacctacatgggataaaccctcaagagtagatatgttaaatgtcaggaatgcctcttgcggtgagggccttgggaaagcagtgctggcttctgggcagccccaaaacatgggcagagcttacgtggtcagagtctcggagtggacaccctttgtaggttgtgtggctcattccattaagtcccagagctggccggtcttgatggcctggggttggtgaccctctgagtcctcgggaccgttggccctctgtgcgctgtccctccatgccccatccctgcatgggccctgcttgccagcattgcccagaactacccaggcattcagagaaccaggctggtactggccagggaggcagccagggcctctgtcatcacaggcctgatgtccaagctcacgtctgtgctgggaacccagtttgcagccagtcatggcaggggagagccatctcttaccctgggttgactcagcaccccagcacccactcgatgaccccaacctgcctttccctgttgctccatggggccagttgccttagaccctaatgggtctttgaactctggctttctttccttcttctcattcctgaaaccaccccctctgctctgagggcgaggctgcctgagcctctgactcactgctgcctcacacctgcctaccccttctccccacttcccacagcaccgcctcatccctcattccttctctccagctggcgggacaggagtccaaaccccaagactgcccaaagaccatgcttcaggacccatgctgcccttccccgagcctgtcctcacacaactctgcctaggaagccagaccacacaggaccctgagcacgctggcttgcctgggagaactactgtcctgtttcccttcaggcctgggacccctgtcttactttgggtatcctccagcaggcttcctgcccagccatggctaatgtttaaaaaaaaaattaggactctcccacagggagaggctccttaaataggatccagatgcttcacttttagagaggctggcctgcaggcagataccaagtgaggggccatctcagtctcagcctgtctccctgcccacagcccagcctgccaaccacagctgccatattccaagcgaccttgtcatttcctcagcgacaagcagagaactctgggcagaaatcatgttcctcttctgccctggagaactctgggtctcatcagggcagacagaaaatattagggcatgattgaagatgaaggttgtggggctatgaccacatgcacggtgacagttcaaaggagctagaacagtaagagctgggtggccaggaagcttcctggaggagggggattggaatccagtaggatgctcttggcttgggtgggtggagggcagccctgctagataggaccaaccccaacaaagggatcaaatcagcagcgcctcactggcacctggggagggagggagggaggtgctcttctacctgtgtcatagctagctgccctgtgtcctctgccaccagggattcctcagctctgagactatctggagtggggtgcctaatgggttaactaagccctgctgatgccaggtgacagaacccacccagtaaatcaaatggcacaagtgtgttgcccttaatggtgtcgtttgaggccaaatgagcctgctagagtctctaaaatcacactgtgtaggaggcgcccacctgtcagaatggggcccacctaagctgagcattttgtggagaataagaaagtaggtgcctgggcagtgggaggggctgtgtcaggctgggtgccaggacttggtgttctaacctcaccaggttgtgacggaacaagcctggtcctcccacccaaccccctgccaggtggcttcagtttctccctctgtgcaatagaggggattggccttactgttttctcagtccccttctcatcatgatattctgagactctgctgtgagtggcatgagatgtctcggtgtggctctccacccaggtcctgctgaggagacacaggagcaatgagcccagggaggggattaacagagggaccgcccatgctgcaaattagcaagataccagctgccaaatgtaacaacttgtgtaattggctttttgttttattaagaggcatgattctctttagccaagcctcaaatgccagatgggcattaaactttggaagatacagagattaacattaacaagaaaaggacagacttgggtagctttggaggctggtggtattcagcaggccatgtgtgggtgtgcctgccagaaccctgcatggagaccaagccagccttggaagtccgtccctgaggcttcttcgtctattgggatgggtacctacatttggctcaagactgacttttcccagcataagacaaactgaatccctgaagcaccgtctgctggaaaatcccctttatgcagaaaaagccagttggcactaggaaaagtcctggcctgccagctgatctttattcagtgaaatagaattattagaatgggctagatgacaaaccaacatgtccacagttgggggacaaagaggggaccaagtagactttggcttggagggtccaagtacatctgacagcaaggccaagggcacagctgcccatggggctagactacaggaatgactacccaccggttctgttctggtgcacgtttgtttcctggctcaggaatctgtgtgtgatgcacctcccgtgctagggaactcaactgggcatcaagagacctgagttctcccaggctcttcctgttgctctttggaccttagtttctacagaggttggcagtcccctaaggtaccctcacttctgacatcagctgctcaataattcaccaaaaggattcacagagctcacaaaaacctttatgctcatggttatggtttattacagcacaaggagacattaagatcaacagagggaagaggggcatggggcccagaagagttccaagcacataactccccagtgtcccctcccagtggagttgtgcagacagcactggtgtgtgacaatacactcagagcactgccaaccagggaagcttgcctgagccttggcatccaaggatgttactgggactcagtcacatggatatggctggctggctggctgcatggctgaccgtagtgtctggccttccagaggttgagctgacaccacatggtccgtggcctcccaccataaatcacattgttagcatagactgtgtcatggcccaaagcccccagctaaacaaagatgctcttatcaggcagcacagtccaagggcttagcaatcccctcccaggggcagggggcaaaggccagaactccccttggacaagggtatctttcttatgcagaggctagatgagatggtctcctggttccaccaaagtcttagactctgggatcttgatcctgcctgttggatctgggtttattcacagcagaacatggagaacaaagttccagccaaatgaaatgtgaaactgtgttaggtttctattcaggtacatcctgtgtcacctgtggaactgtgtttgatttgttctctcccaaggatcatagctggcaggctctttaaaaccattagcttacatttccttttctactctcctgatctttgtttccaactcctgatgtggcctactgcagaaaccccacagtagcagggaaacccgcttccttgcacttcttaacatctttcatccttgaggtgcgggagagccaaggagagagagcgtggccaagctgcagctgttcaaatggttctgcctgctgccgaccaagatctggagcgaaagcagaaatttgtcacatgttgtggcagtgaagcctccccatgttgctgtcctaaaatcccagggtctaattggaaaggaattaaaaacgcaggcctttctgggatgctttggttggattcctagaaaacttctgagaataaagcattgccatatggctgttttcttgtttaccttggggctaaagagagacattctggactgaaatcttccacattgtttcagagacaacacatccaacctcacacatttttgtggtgctaaaaaccagtcttgttccactttgtggggatatagacatgaatctcaggcctttggaacagggattactggctgacttgagtctttattccctgtagggcctatggacatcttggtgtccattcttctcattgctgcctaagcagatcagttggctctgtctcatcctttcctagtccccagctgagctcttccaggaaagaagaacagctgtcttccaccaaagtctgcccccaagcagctaacagagtcactatttcaggagagaccttcaaggggaggaccctgaatggctggggatgccttctcatcctgctgttgtttggctcaacatttcaatacatttaaatattcatttaaaatacttcaacatttaaatatatcatttaacagcattagaatgctctgcaccaaaaaattaagcaaagggaattgtaggaatttttttggccttttcaagctattagtattttaagtagacctcagttcaaaactggagtcttgaaaatggtcccattactataaattaggatgccgccttgtgcttgtgtgagacgcttccatcttggattggtccgttgatgttccttggactgaagagctgcagtgagttcagattctgagtgctgggtttcacctgacttcttgagtcaccagagggtgtgcttgagtcaccagagggtttcctccaagaagaaagtgaggaaagggacatggggaagcaggcagaagaaagttttcagtgaccagagaggagtcagagttacggatttttaaaaaaataaattgcatgtcactgtcactctgtcagtaaacatggattgaggacctgttgtggacttgtgctgtgtcaagcaccggcgatacaacagtgaccatgtcagacggtatccttgccctcaagctgctcacatttgaatagagacagagaataaacacatgaacagacaaggatgacaggtggtaaagaccataaagaaaagcattgagggagatgtttcaatgcggagtttcaatggctggggtatcctcggaaggcctctgtgcaatgacatttgagatgagagctgcattttgagatggagtcagccatccaaaaatcaggggaaagagagacccacaccaaggctcagcaagtgcaaaggccctgaacctgaaaggagcttgacacgttcaaggtggcacacaaaggccactgtggttgcagcatcaaaagtgagagggtggtaggagatgatgttggagaaggatccagaagcccaggcaggtggggccttgtggatgacaagagtctgggttgcccattagaggagggtaatactgggagaagcagtccctgtctgcaaggggtggaagaagggctgagggctagccctcatccctttgtcgggtaccaccagcccctgccagtcgtgaggcttgcaggctgcaggaggctgacgcagatggtgaatgttaatacccgtggccctggtccgaccttttcagcattcggtgttctgattaactggccattctccctcttcagcacatgttgaagatactttgttcaggaggaagttgaaatggccagcccatctaataacagaatattgaaaaggtcacagcagtacggctgagttctccaacctacaaatcacagggagcgtcagctcggataactcattctcctgacaaatcaaggagcaaggactgaagactgcaccgctgattaggctcatgggaaaccagagggccagggagaaatcgatagaacatcctgcctcgtgcaggggttcagggcagcaggggtgctgattagcaaatcagcaggtgggggcatgctgtcccctggtggccgctcaaatgacagccgcatttgaaagaccccagaggggaggtcccatctggacctgcctgggtggtccccctggctcagcaacttggctggagattgttaccattttaccagaaaactattaaaaagcagctttccccaaataaaacatttgccattaaaatccctaaaagttgatctctttcaggatatcttgtgttctttttccattaaggtttattattattattattattattattttagaaattaacttttgccatgaccagcctttttgagttttgactgcaagcaacaacagtcaaaactcaaactcctcgtaaaaggaggacaggtttatggcttaatttactacagagttccacaaacaacattaaagaaaaatgactgatttaattaaaaactgggcaattaaccttctgtgcgctaaaatagagggctttctgagggctttccacagaagcgtgtcttcatctgtgaggcagcggcctcagagaatcttaatagatcagtgaagctggattgaagtggaaagctcaccttaaaaagaaatctaaggagattaagagggggatgaacatcaaaaatgactctgattaagccaagataaagaatgctagaatctgaaagggagaaacagcatacacagaatatatttttaaaaccacgggcacaaagatttcggtgggctttggagataagggggactgacattttgagaacggttgataaaaagcttttcagcacaaatgttcattttcactgggggctgagcacaaaaatccatggacaaaattgaaattctacatgctaagagaagactaaaagatttactggcacagattcaattaagtggcttaaaaaatgtaccatctccttcaggattcatttaggtgcctgcctcataactgcacaatttcccaaacgttgcttgctaatgtgtcaggagggatgattcctgcaggaggagcagggagtcttcatcataggaccttgaatcagggctcagcaggtgtaagaggcccctggcatggggcagcccctgccaattcctcctttgcggtggcctgctgccacctcgatcaggaggttaggtgcccactgggagtacactcagagtcccctctgaagtttcaggccttgagacagcaggctttacttgtgaccaccaccacccacccccacacccccaacagaaccgggctttagttgttacaagcagtctggagacctggactttcagaaacagagcctagctcaagatgcactttgaacatgtcccttgctgagcagtgttggaaactgttgaccccatgggcactcttggttccatatttctgagttgtcaatcgcctgctgatgctggaatgtcaggcgtgtcctgccttagccaggctgccctgttcagtgagaagggaattatttaaagatctgtccccagcagcacattcagggcccagaggtgggctaaagcatctacgggaaggctggtgagttattgcaaagtggcaagtgttaattcagtgccctctgagccgccgtctatgaattaacccagccattagaacactagagttagctcagtgtgaggccagctcagcggtgagagggcctgcacaaagctgttaaggctgatggaaagacaggggtgggcagggtgtgggcagccctcattttagacaacccttgggatgtgaaattgcagctcgaccaaggtagtaagcaggagtttggtccctgtggtccacggcctgccagctctgagatgccctcagcccaggtttcatcctggctgtattgccaagtacactggctggaggttcaggagcagccttgttggcctcccacgtggatgctaaatgttatttttaaggcaagagcaaggaaagtgaaatgaaaaggcacttaatatagttagacctacattgcggctggccattcaaattcagggctggacggagtacttcaggctgcggtggtcagggaagaccttcctgttagtgaccaagcttgggggaaggcgtgattgtgacaagtagaagaagaaaagtcattaagggtgggaatttccagagttgctgggggaaaacaaggattgagggggctaccgtaaatgactcccccataacctgatatcccccaaaggaaaagcagtactagagctgagggcctcctggaacacccccactcatggaaatgtgggcagcttctgtgggcacttggtacctgtcgctgctgccccccaccacatgcttaaccatgaggtaatttgtacacctggttttgtttgtatgttttttttctctgtgaagtatgcagattattcaaaaagagaaaataaagaagggtaattatttttctttaagaatgacagcgcagtcataaaaccccaaatggaggtaaaaagggaagaagttaggagagagagaaatcaataaaacagaagaggtttaaaataagagctctaaagggctgacagctataggagacaggagaggaggaattagcctggaatttaaatctcagatattaaacttaagatgaaatagaaaagaaagaaagaaaaaaatgaattttaaaatgagtgatttaaaaaggagataggttaaaggcatagtaattgatgagttaaaataaaagtatgagatgatgcttttaaaatagaaattaactaggatctagaaatggctgctgagactatgggaaggagttcccggagagcaggggccaggcctggaagcacctcctgtgctcagcctcgcccttgtgttcttttgcctgctctggacagggagcattttccagtctccatgggcaagggctgccttcccatgtgcacaggcacacagcaggcccagaggcctcagcccccagacctatcagagaaatcctgaacgcatagacagggagccccacagacgcactgagaaagcgctcaggctacgtgctgggtgagtgaaaacttatcaaaaaacgcaagtgaacaaaggctcctcctgccctcttttgggaggagtgactgggttccactgccaaatcttcaaacactggttctcaactctttcagatccagtgccgactttttagaacaaatatttaataacaccccatgtattgccctgaaacgaaaattatagacaatgtaatccacttccacacttaatttcacaatatgatgtcctaattaaaatataaatgagaaatacaaaggaagtaatttgtagtaaaatattacatatttcaatatgcaagaccacagtggaattcataatgatgtagccagatgctggcatgaaggcagcctctacaaatacaactgatacaggtttatggaattggcaactcatatgccacaacactgtgttgccattggcaacgagataatgatgaacaactgttgataaagttctgaacaaaataatgtgtactcattccttggtttttatagtagttgtatcccagagaaattccaagtatattaagccatgcacaaaatactttgtattcatggataactagagttaggttctaggctcaaataattataaatatgttttcaactacgtgaatatccaatgggatatccaaaaaatgggggcatgtgacaatgtattgttgtgaaggactgtcttatacaatgcaaaatgtctggtatccctggtccttgctcactcaatactaacagcaaccccatccccacctcaatcattgagactgctgaaaatgccccagtgattgccaaaaaaaccactacaaggcagttctgccccacttagaaccactgtcttagagggagaaacttgtcaggactagaaggcatttgacacctcctttgggtttcctcatggctatacattcccagtctcaaaatttttagggaaatttttggggtaaaaagggacatttggaagcaagagcagaagactctgaaagagatacctatgcgttttggccaagatgtgctggtctgatgctccagggagccctgagatccttgggcagataaggatgaaaagaggaaagattggagctcaggcagagcaagagagggcctgctgctgttgtagaagaaactgcagatgacagaaagggtgcttctcaattagatagtaaataactataaaggattatcgcagtcaaccgcgaaatctcaagataacatacaaaggggcagaggtaagggtctcccactcccaggatggttttcatccagagacaataccaagtcattagaaagctctggaaagaagccagcactgcagggtcggaatgcgacccctccttgaaaagtttattagagcgagaagaggtcgggaatcatgtttcagacttgctctcggcttcaagggctcagaaaaagttaatctgatgttctcctgactctgggtcatttaactcatttctaaaatgggtttcttgctcagagcagaatttcgaggtttgtaaactccaagaagagaaaaaaaggtcctacacaattgtgttattgtgattgaacagttttattctcaaagatttaatttcccaaattttgctttaggaatacacggtaaatgcaacacacggtaagatggcaattaagctccctgcgttagggagtatcactcacggtgataattgggaaacatgacagagaatgggacgcgccatctcagaagagacgaagaggcttttcaattactctggaactttatttattatttttgaagggtaatgcattgccgctcttaactgtctgaaattaaagtggacgttgaaaacatagcccttctatgagcttatttttatttttactgagcataattggacaatataaaaagtttactttttaaatgtgtcatctcttgtttctttaaaactgtaatcacatcaataggaactttgctgttgagattttattgctttgtctaggttccttttccagcctatcaaacttggtaaatttaaagattgttcacaaataatgaaagctgacttgttgcaaaaaaaaaaaaaaaaaaaaaattattgcctgaaaacaaactctaagagacactatagtgatgtttatgttttttaacttaagatttgaagcaggaatattttcagacttagattctgcaaaatgatcattggaccagaacacattttcatgtgttaaggtcagatcttagagccagctttgaattcaacagtgggttctttctttctcatcatcaaatgggctttaaaaggtcaaggaacagcgaggtgctggtgggaggaaaatcgccagaatttctctttcctattttgagtaaacgttgagaagattgtacttggagtgtactttataggtacccgattggggacgaagaggagagggacagggtgtgttcccatgaaggccccagccctgcagggaagggaggccacgctgagggtccactgttagggctgtttgattcctgggcagcacttcaggaaatctgttctcttggaacccacttatggggtttacaaagcagagagccttgaggcaggctggagctcagaatactggctccctggtctgccagggcagtctcagcagcacggggagtcaggtagaggcctttccacacctgccctggcctccttggctccccgggaaagctcccgtgagggacaactgaggccatcaccagcagcagaacgggtaggaaaaggggctcagagaagagtttcaattaagccaaagaagagtaaaggaaatgcttttaaaagctgaatgagggtggggcagatgtggggcctttcattaattcaagtgtactctaaatctttaagaagcaagacactaatattactgccaacaataagtggctaaattcagtgaattttgacaaaggcatcacacccatgtaactactatgccaatcaagatacagaccattgctgtcatccccagaactttcctcccggtgctttcctagtcagtccccccatcactgccctgccaagggccattgctgatctgatttctaatatgataagttcgtttgcctattctaaaacttcttgtaagtactcttttgtgtctggcctcatttccttggctgaatatttttgaaattcatcacctttattcatcagtctcccatagtcagtcagtcttcacatatccacaggaattcacactgcgaataaaccaggaaaatgatagatacagtccctgccttcttggagtttactatgcgccttttgacgcagcttctctactgccaggaatctgtcccaaggaaactatcacaatgatacaaaaagatgtaggtggcagcattaccaatattagtgagaaaggcacacagaatggccaccaaagattaagtcatttataggagaagggaaggaccaaatcctatgcattgttacacatcacgctctagctagaagagcggccaatggcaaaagaaatgccaacaggttaagagcacaaaagttagggtatacagaaagaccccaccgtgtgagaatttccacatgggtaaccagacctgaatgctcactctgcatgttgggatcatcggagacttatttcctttttagttctttcctttatattccagtttgtcttcagggagtatgtgctgttttgcaatcgggaaatagcattttacttaaaagaagtgggaggctgaggcgggtgattcacttgtttgagaccagcctggccaacctggtgaaaccccatctctaataaaaatacagaaattagctgggtgtggtggcgggcgcctgtaatcccagctactcaggaggctgaggcatgagaatcgcttgaatccgggaggcagaggttgcagtgaactgagatcgcgccactgcactccatccagcctgggcgacagagtgagactccgcctcaaaaaaaaaaaaaaaaaaaaaagaaatagaaccctggctgggatgggccccatcgtgcaagcgaacacaaggtatcagcagcacgggcttcagggcctggggaggacagcacttggcatagccagcccaggccccctcgccctccctgctgggggctgcctttgctctcagagtcctgcccctgctgcttgattcactgggagaacaacacgtaaggccgtcattcctctaatcagccttcccaggttgatgctgggagctgacgggctgaattggccagtgtgttcgtcaggatgctgcttcctcctccccaaagatagttatagccaatttcctgaaactatgagtatgtccccttacatggcacagggactttgcaggtgaagttaaggctctagacccaggggagtttatcctggattatccgagagggctccatgtaatcataaggttcctgctatgtgaatgggggtcagtcagaggaaatttgaggatgctgcgctgaaatgagtcaggccaggtggcatcctacagcagacaaggacaagctgagcagatagcaggtggccctgggtccactgcacactttgccaggctgagctgaccacagactggctagcatggctggagttctatgcccagcccaagccgactggtcctcctgagtgggcaccagcactgactgtgctgcctctgcccagactcagctagaacaggagtgggctgagaagctgggggcggcagaggcctctggaaggccccaggtgttttgtggccctagcacacttctcctttggggacctcagcatgggtgtctccgagcccaagtcaactactttggcctcattttagggggtgtggggggtgctagggagagaggccagaaggagtaaatcttaagaaatgaggtaggcaagaaacctgggtctgcagagcctgcagaagccaatgaagcaatgaaagggccctgtaggtttggaagcaaatggccgttctcacggttaagttacttgggaagaattccattttgctttacaagggatgatgtcagctttaagccttagctgaaatcagccccttctaaactgtaaacagacattgataggccaaacacaactagaaattggctccctggctcccaatccctgtcccttttttccttactgccagtttgttgtttgtatgaatatctatcagcatctcctgtgagccaggctgaagatgcagctagagagaggagcttctgccttgggggcagaagagagggaagaaagtgaaggaagtgcttccagtctggaggaggagacagagaggccaacggggagttctcctaggggcagggcagggcacggggacagcacaaacaggagggggactgagactctgccaaaggatcagagttgctcttccaaggccagctgaggtgaatcacaccaaatctcaaacatgctgtccttcctgtcccacttgccagggatctgatctagccacactgaccagcaggctatattggtccctgcccggggtctgtccagggctttgcagtccgccccagctccacacttgtgcccaatggacttctcagactccagagttactgcaacctttagttgggtgctgggccccactctggccctggactgtaaaaccaacctgaaatggaaaagtgggtggcatggccctttaccagctcagcctccagcacaggctcttcctgatgggcagggaaggggctgtgtgatgtggcctagggcctcgtttgcatgcccagcattgtccccataaaagtcctgcaggaagctgtgaggggtcccctgccaaaaagactgcgtgggcctgagggatccctgcgaggcaggccaggaggcagccatgcttcacaccacacaggtgggtctttcatgctttttttccctttaagtttctagtcttgtggcaaccctgcagttgacacttacaaagtggtttctgctcacttgtcactaccatatacttactcatcaacgggctcctggggcctctctggtaaccagtcccatctgaagaaagctgagaggtttcctgaaacatgctgcaggggcgtctacctgtccttctcagcctggcctctccccaggggaggtggctggaccttgggtctaaaacttggccctggccatcaaaactctccatgacatacttcttcctctcaaattccccctcccagtacctcctcctagagtccctcccagacttcatctctaaatccaggttcagtggcatatccaggtagagatcagtggactacctgggcatgcccaaatttgtcttggcgcccacaagccatgagcccatgaatgaaggggctgattggtgatgacagtggtgtccccagggcttagcacacagtgggcacacagtatgtgtttgtgattgaatctatggcaaataagaattatttcgtagtgtacatagctgtctgcatgaaaagactatgttttcatgatcaggacttcttacagcacagcccccttagcccttggctgtgggggaggtttgggcagcagttataactggcctccaggacccagaaggccccctgggacccaggcccccaagcctctgtaagaggccttgagcctcttcctcttaaaagataaaacactagccatgcgaggatttcctgagatgcctggacatcggtcctcactaagagtcagacagttctcgatccatcttcccatgggaccagggcacagccatgggtgttggtttcaaggagtttctcaggagtgtgaaggggagcacggaccagcacaaaaacagaattctgagtctgaaataaaggattagaaaccccttcttggccattaaaacctaaataactagaagatttgtttcctactttcttttaaaacaaaactaggcattgttgtgttgttgtttgttctttttgtttttgtttgtttgtttgtttttgagacagagtttcactctgtcgcccaggctggagtgcagtggcacgatctcgactcaccacaacctccgcctcccaggttcaagcaattctcctgcctcagcctcctgagtagctgggactataggcatgcgccaccacacccagctaatttttgtatttttagtagagatggggtttcaccatgttggccaggatggtctcggtctcttgacctcatgatccacccgccttggcctcccaaagtgctgggattaccgccgtgagccaccatgcccagcccaaaactagacattgttaatgctagtcctaagtttctgctagagcttagtgtgtcttctgaacccaaagaaacattcagtcatattcaatttagcttcatgctaagtgttatttgttttcaaaacttgggaagctgtctgggaatagctgaggagagcactcaagtgtctagagcactgccttcctcagccaggctgcacagacgtctagcacaggtggctggcacctgtgaatatgtattctgcaattccagtagcacctgtcaggatgctacgcctcttttaacatgcaaactacataccaacaactgcttagggctgataaaatctgcccttaggagttcagcatcaaccacagccagagaccgctgctgacagcagggcttcctagactcaattagcagtagacagagcccaccatcagcatgacaggagccagcaggcacagagcaggcctaggcccaggccagcacggcagtgacattcctcatcccacacatgcatgtacattactgtcatcacttgggtgccatcagtctcactctctggtggaaagatggtgctcccggggctgcaggtgtgatgtaggtgacgtgagatctgcatgggcacagctgtggcctttgaattataagattgtctcaaggccatcagctagaggactggtgctgtgcccttagttataccagtatctatggattggtctcatggattccctgcccagtgccccgccctttgcccactctctgaggccacaggagggatgagttcaaactctgttcacaaggagcttacgtggtctcattgaggaagtaaaaggaactgccagttactgctgggtgtggattcactttacttcctcagtgagacctgggcctgggccaccaaggctctccaggatgtcctctgcatgtcaaaacttcaatgcacactcaaccacgagggctgagctggaggagcttccaggcctacccagtcatctccatccatctttgaaaacattcatggaaccccttttagaaccagctgatcacattcccatttcagcaatagggattgtgcgctcctctgtcgcagggccaaatggcgctggctcatgcgtgtgtcattctagccccttgtctctttccaccctggtaaggccttaagggcttcccacctggtccgtagcatcatcaactccctgtgctttttttttctttttggcggctatctctccatccttataatagtcctgtataataggggtcagtttacagatgcacaaactaaggttctgggaggataagtgacctctctgaggccacatagcaggagcagaattaagaccggatgcagctcctgaccctgcggccagtgcagaatagctgcaggggcctgttttcaaaagcccaccccttgacctctgccccagtctcagtaactctggcctgcctgtcctcagcagggaagagccaagcaggatgagcactgcccccgcatgtccagaacgctgtccagcacgctcagggctcctgccgctgctcaaagaactggcctctgggaagtgccactgcaacccagaggcccgtggtgaacaaagccccgcaggcagcatgcctccttcctgcttctggggttgttatttcagatggcaactgtgtgtgtgcgcttgtgtacagttatttttgtctttggccttatggcctctgctataacactgtcaggtggcaactttttaagaaaaacttctagaaaatgttgatccaaattgtatgactctggttgtcccacccccacctcacctagctctgtccctcattttctacaacattccctcattttcactcctagttatttccatctgagaaatggtgccccacacactctcctgccaaactccaggggagggcaggaggaacgcctggggcctcttttgggggtgtggaagggacccctcgcacgccccttcagaccggggagcagtctggctccagcccacatgcagacctttgcttcctcctctgcagaggggttatttgttcatcaccaaaaattaggtaggagagaaaagaagccattcaagaaaagaacttttcacagtgcatttcctggcttggctgtgaatggcatttgtaaggcccaattacataaacacggagctaaccaaaatgctatctgtctttattgaaggggtggaggagcaggagggtgtttatttgtaaagggggtaggggaagtgtgtaaaagagagctaaattctcatctttatactgggaagttaatagatgccaaatgcacaagtaggatattttaaggtaaattccaaaagaaccaactaaatgggctggaaggggagagaaatgggaagaagaggacagatctgctgttttccatttaaaaaccttaaataattattggactgtaaattatgggcttatgtatctttgattaaaatataatttttaaagagtgtttaaaatatttaaagcaataagctattcgcaatagcaaaaacatggaatcaacccaggtgcccattaacagtgaattggattttttaaaaatgtggtacatacacaccatggaatactacgcagccataaaaaagaaggagttcctgtcatttgcaacaacatggatgcagctggaggtcattatcctaagtgaactaacgcagaaatagaaaaccaaatatcacatattctcacttataagtaggagctaaacattgggtacatgtggacataaagatgggaacagtatttgagaccggcctgggcaacatggtaaaatctggtctctacaaaaattgtaaaaattagctatgcatggtggcatgtccctgtagtaccagctacttggggggctgaggtgggaagatcacttgagcccaggaggttgaggttgctgtgagccaagatcacaccactacactctagtctgggtgacaaagcgagaacttgtctcaaagaaaaccatatatatatatgtgtatatatatgtgtgtgtatatatatatatgtgtatatatatgtgtgtgtatatatatgtgtatatatatatgtgtgtatatatatgtgtgtatatatatatgtgtgtgtatatatatgtgtgtatatatatatgtgtgtatatatatatgtgtgtatatatatatgtgtgtgagaacaaaagacgtggggactaatggggaggggtggcactgagcaagggtgaaaaactacctgttgggtactatgctcacttccaaggtgacggatttggtcatattttaaaccccagcatcacacagtatacctttgtaacatccctgcatatgtaccccccaattctaaaaagttgagaacaacaaaaaaaagcaaaataaaatatttaaagcaataagaaattgtgacagatctaaatactcttcaaaaataaaaaaaagagccatactagacttataggaaaaatttaattgctatttaattaaaaattcaaaatataaggccaggtgcagtggcttacacctgtaatctcagcactttgggagtccaaggtgggtggatcacctgagatcaggagtttgagaccagcctgaccaacatggcaaaaacccatctctactaaaaataaaaaaactagctgggcaaggtagtgcatgcctgtaggcccagctactagggaggctgaggcaggagaattgcttgaacccaggaggtgaaggttgcagtgagctgagattatgccactgcactccagcctgggagacacagcaagactccgtctcaaaaaaaaataaaaattaaaaatatagattaggcagctgaagagagaattaaaaatttggaagacagctgaagaaatagcctagaatatagcatagagagaaaaagaaaaggaaaacataaaacagcagctaagatatgggtgacaatgacaagaacccatatacatctaataggagttatagaaggtgaaaatagcaagaatgaaaaagtaatgtttgaagagataatggctgggaattttccagaattgaaaaatactttcatcttcagattgagaaagtataataagttccaggcaaaattataaaagtgattcaagacttaatggtaaaattgtagaatgtcaaacataatgagaaaaacttaaaagcaaccagagataaaagacattacctacaaagggacaattatatagacagaaaaaaaacacaacagatgccagaacacaatggaataatattagaagctacgagaagggctcaggtatagggactggaaatgcagcaaaggggcagtggagacatctgtgccgctttccctctgctggccaaaataaaaaaatttacatatgcagatattactagttgccttccactaaacatcttcccacctcctcctttagtaacaaaatcttgaagttacctggacacattgccattcagataagaaactacctttcccagcctttcttatagctaagttagccttcctaccatgttcttttcaatcagatggagcagaagtgttatgtgaaatttccagaaagccaccttaaggaagagaggggatgtcctccttcttcctttcctccctgtcactgcctggaaggagaatattttggctagcttcatcctggaccatggagcccagggccacacccaggggatggcagaatgatgaactgagatgaccctgggtctctgacaagttaatggaggacactatgccagctctggatcacccgcctctgtattcttttacataaagacagcaaaacttatcatttgtttaatccattatgtggatcgtacctgttacagaaaatttaatcttcactcataccaaagagcttttgattgtaggaaagaaaacaggaacctaaaccttgagagaaaccttaagaaggaagagagggagtgaagaaccaggggaggtagtcaaccctgagagcctgaggctggagggaagatctgcccatgctgtgtgggcccttcgtgcaacagcgggttctcatggggctggacacagaggggcagactggggccccagcgggcacagcagtgctggtccccagaaggggtttgtctcagtgcctctaataaccatcactcttggtaagtgtatgacactatctccaagaacagaaagaacatatagtccatcccatgggtcttttacagtcacatagcagcatgacaaacaaagtccatcctatgggtcctttacagtcacatggcagcctgacaaacataaagtccatcctatgggtcctttacagtcgcatggcagcatgacaaacataaagtccatcctatgggtcctttacagtcgcatggcagcatgacaaacaaagtccatcctatgggtcctttacagtcgcatggcagcatgacaaacataaagtccatcctatgggtcctttacagtcgcatggcagcctgacaaacaaagtccatcctatgggtcctttacagtcgcatggcagcatgacaaacataaagtccatcctatgggacctttacagtcacatggcagcctgacaaacaaagtccatcctatgggtcctttacagtcgcatggcagcatgacaaacataaagtccatcctatgggtcctttacagtcacatggcagcatgacaaagtccatcctttgggtcctttacagtcgcatggcagcatgacaaacataaagtccatcctatgggtcctttacagtcgcatggcagcatgacaaacataaagtccatcctatgggtcctttacagtcacatggcagcatgacaaacaaagtccatcctatgggtcctttacagtcgcatggcagcatgacaaacaaagtccatcctatgggtcctttacagtcgcatggcagcatgacaaacataaagtccatcctatggatcctttacagtcacatggcagcatgacatttggaagtattctgctgtgctggctgcactcttagcttctttggtgcagtgaggttgtgccttgtgggtcaatgacttctgcaccgctggaagctcctcagagagatggggctacagggaagaggacacatggagaaacacacacacacacacacacacacacacacacacacacacagagagagaggctttcaacaggggagcacccttgcactccatcttttagcaattaaaagagtgtttggtgttcttcccccaggactacccactgctcatctctgggtttgtgggtctcacacataggcaggggtccatatcccagccttccctctgcaaagaggactgaagttgtcacaagatgtgttttatttattttcacgaggacacggggtctgtgtacttgagagaactattctgagatctcactgaatacgattagaaaccacacaagccctggtgtcaggactctaagtggcagttattgaaaagatggtgatgacttagctgttttaattggcctccatgcaggagtaccctagttctgctggttcaggcgggtagattttaaacctggtcttataagagctgcattttccaggcagtttctctgttccaggctccatgctggggactttccgtacaccatctcacttaatcctcacagctacccagtgtggcaagttctattagtatccccatttttcagatgaggaaactgaggcacaggtaagtagccaacagtccctccacaaggaagcagaggtagccggctatgagttctgagcagctggactagagaggcacaggttgcgaagtggaggacacacagctgagagtggcccactcccgcccagtcacctccgtgagcactcctgccctttctgcccctcagctcctgcacctggccagacttgggggctctcacaggcttgcagcccctttcccatggcatcctgggacccccaccaactcctatggggttatgatctgctcctcccaggagaatgggatgtagactccccttctagtggctgtctctactgttctcatctccaaattcctttcccctctccctcccagacaagtgacttgatctctcattgggagggaaaactagctctgaaattcctacacattctccccagtgcctctgcttagactctaaactttatggactccatagctttattctttgctatgaaaagctaagattttgcagcttcagacataaattacctttcaaaagcctgttttctgcaaatcaaaagccttcattttcagaaaatggtctctggtatgattttcaagagccaagagtttgatacctttatgctctgtgcaccatacttttctctgagaccataacattcagcctcatgtcttattttaatggtggaagaacttaggagaaaaaaacaattcactgaaaatgaaaaaccactggccatcattctgaaatactatcctcaccaaactatggctttggacaaaactgggcctcagtttccttgtcttttgagtgaggggctggatatgctagtctctcaggttcttcctggctatgatgcaggtgtcttacactttttgggtctgtttcctcatctctaaagtggaaactaggtctatttatggaattaaataaatagaaataatgcagctataacatacctggctcagagtgggccattaatgaatagtaagggaggttttgtttgtttttgtttttattaatcattgtcttattcaaggtcctcttgaggactaagaaaaggaaaatacgtggtgttcatctgacctcaagggattgaaagtcaaggctgagctcagtggctcatgcctataatcgcagcactttggaaatccaaggtgggtggatcacttgaggtcagaaattcgagaccagcctggccaacatggtgaaaccccatctataaccctatctatactaaaaatacaaaaattaaccaggcatggtggcacacgcctgttgtcccagctactcaggaggctgaggcaggagaatcacttgaacccaggaggcagaggttgcagtgagctgagatcacaccactgcactccagcctgggcaacagagactctgtatcaaaaaagtaaaaataaaaaagattagaagtcaagaggattgggtggggtcacctgtacgctgcccagggagcatactaaactgagcctgctgtgtgacacacctcccgacagagggagttcacacgcagccctcccaggggaagagacagagacctacacagccacaggcaatgcacaccggtgtctactgcctgcactgatcaacccatcatgcacaatgcagcagacaaacggggatcgtgagacattttgagaaagccaagagcacaaaagggaagaaccaacaggaaggaaaagagcaactggctgtgggggatagggaacaaaggaaaaatttttaaatttttaaatctaataaaaaaaaacctttagagggacttgataaaacatttccataaaataagaacaggttgttatgagaaaggaaaatagcccaagaagtatttcttggaaattaaaaatgcagtcaccaacattaaaccttccatagaaggagccgaagaataagtcaaggaagtatcccacaacttagattaaaagtcaaagaaatggaaaaggcgagagagaaactgagaaacacagatgactagcaataccaatatctaactaatatcaacccagaaagagagaacaaagaaacttaagagcaggaaattaccaaaggaataacagaagaaaactccccagagctgagctaagatatagaccttcaaaaagaatgacccactgagacagaagcaggggggaatgaaaaaagacccacagttgtatagttgcgtatcctcttgatatttcagaacatttaggataaagagaagattctcaaagcttccagaggtaaaagacaagttatcaacaaaggatcaggaatcattgttggcagattggcattagcaacactggaaggcagtgaggtaattgccttcacagttcttttatttttattttttatttatttattatactttaagttctgggatacgtgtgcagaacgtgcaggtttgttacatacgtgtacatgtgccatggtggtttgctgcacccatcaacccatcatctaggttttaagcccggcgtgcattaggtatttgttctaatgctctccctccccttgcccccaaccccctgacaggccgcagtgtgtgatattcccctccctctatccatgtgttcccattgttcaactcccacttatgagtaagaacatgtggtgtttggttttctgctcctgtgttagtttgctgagaatgatggtttccggcttcattcatgtccctgcaaaggacatgaactcattctttttaatggctgcatagtatttcatgttgtgtatgtgccacatttcctttatccagtctaccgttgatgggcatttggattggttccaagtctttgttatcgtgaatagtggcgcaataaacatacatgtgcatgtgtctttatagtagaataggatttatagtcctttgggtatatacccagtaatgggattgctgggtcaaatggtatttctggttccagatccttgaggaatcgccacactgtctttcacaatggctgaactaatttatactcccaccaacagtgtaaaaacgttcctatttcttcacatcctttccagcatctgtttcctgactttttaatgatcgccattctaactggtgtaagatggtatctcattgtggttttgatttgcatttctgtgatggccagtgatgatgagctttttttcatatgtttgttggccggactccttccttacaccttgtacaaaaattaattcaagatggactaaagacttaaatgtaaaacctaaaaccgtaaaaaccctagaagaaaacctaggcaataccattcacgatgtaggcatgggcaaagacttcatgactaaaacaccaaaagcaattacaacaaaagccaaaatagacaaatgggatctaattaaactaaagagcttctgcacagcaaaagaaactatcatcagagtgaacaggcaacctacggaataggagaaaatttttgcaatctacccatctgacaaagggctaatatccagaatctacaaggaacttaaacaaatttataatagaaaaacaaccccatctaaaggtgggcaaaggatatgaacagacacttgccttcacatttctaagggcaaacaattttgtacctagacttctataccaaataaaaacattttcagtatacaagaaatgagatttcttgtatatctttctgatttaaaaagtgggggccctgtagtaccagctacttgggaggctgaggcaggagaatggcgtgaacccgggaggcggagcttgcagtgagtggagatcgttccactgcactccagcctgggagacagagcgagactccgtctcaaaaaaaaaaaaaaaaaagtgggggcatggagggtgaggagtgtaatccagcaagacagaaaaggaacctagaaagaagaagagctggtccaagaaacagaagagctaagccaggtatccagtgaaacaaaaccccggcaggacttgtgggacaactgtgtaagaaacctgggagagaatccattcaagttagaacagaaagtcagaaggttctgaaaagcaagtcttcaagaagaaagttaattccattgaacaaaaataagatgaagaaactggaagacctcagagatatgatgaagaatacgtatgtgctatccctcaataaattttttaaggcagttaaaaattctggagaaggcaaattgctaaaccagaaagacatcataaaatattaagcaaactaaaatatgtcacgattttgagcaattaaaggaagatgaagaaagagaacaatttaactatgaagcttaaaataatctccttcaaacagcacaggtgagtcacctgggctgacatctcccctgccgtgaggttcactgtatctttctgccatggatgagggttacatcatcagaatgttgataatgttctttattcattttcacttttagagtcaatgaatagaaacttacacttattacttatagttacagaatgtaatgaggtaaaaattaatgttttagactgtataagtaacagggaaggatcagggaattgattttttccatagtgaaggggcaagaaaggtgtttaatttgtccaattgtattatttgcagtttttgttttttatggtatgcatattttgcttttaaaaattttcaagaaagtggtgccatattaaatatctgaaggtgtttcacaggctgtctcaggcctataagaattcactgccttttctgttctgtgccttttactatatttttatttatttgccattcttcaaagattgcaattttaaattgctcaatatattttctcagttgaaaatatcaatgtatttatgtaatgaaaatgccaatatgtgtgtatatatctggaattagcatagaaatgattaaagcagttcagcgttgatcaataatcgtatttgatttgggatttttactttgtttccctcgaccatcctgtgctttgatatttattaccacccactgagattctggcctcaactaaatagaacttgcttaaggaaattcaaaatctagcaattgaattcaagtggtgttgctcacagaatgacaatacagaattaggacttgcagagtaaacagaaacccagtagatgggaactgcacccttgataaaatgtctcttactgccttgaatacaaccaaacatcaccaaaccacagcccccggctataaaaaactttttttcaattataaggtcagagtcttctttcaactgcgctaagcagtttgaccaaaacgtgtatttctgatatgtgtggttttggaagacctaagattctcaagccccagggttcagaaggatgccgcagtgttttgaaaagtcctctgtattccacgttctgtatgaagctgccaagttgctcaggtgttcccaggaacagagaggtggccgtgggccagcctcccagggagcccagatgctggctgcaggctgtctccacacccgtgctgagtgtccagcccagccaaggtatgtctgctttctgttggcaccgctagtggccctaaggagacatttcacatcagagctagcgtcaaccctccctctgtcctcctcacagaggactcagaactttctctcttcttccagagttgctaagggaatccgcaccctgctttacctcttgctaactgaaataaaaaagttttccaggacaagtggcctgagcccttgtgatgatgcacaataatcacccgtgcgacaagagcatccttcatctcgatgggccggcaggggtggtccctggcctgcttctaggaagaaggaaaggcctcaactcccacagtcattaggacaatcacaggcaggtgggttttctagagatggtgagaagcagctccccttatggtataaggatccgtgagcaatcagaaaccagggtattctgggagattattggaaaggcatactctgggtaccatgggttctatggctgccatgtgcaaacacacacagcgtgaaggcaaacgaccaagggggtatgcacaaatcgatgtggccttgttaggggtctgagaatcactggtcattctttttttctttttcccaagttttctcatagtccccatgaaaggggaatgtttagggttacaatgttaatttgcttttaactgacatttgccctgtgtctggggtgtctctgctcagctcacctgcagcatctgattcaggctggacgtccatagtaggccctccagaaagactcatgggacacacagccctggccagagcagacaggcagaggccgactccaaatgttcctccttcatcaggtgttggggtaaaagcgctgtggatgagcaggttgacagcttgcctcctcactgcagtgctgtaagtagaagatgaatggtgctgcttgttcagagataattgacacaggatttttccacttccttgctttggcagaggcacagttttgttttctttgactccaagctaaaatttcccctgccccttctctgcaacctgcccctggtgccctctaagcccctccatggtgttgaccagcctgaccccacagcttctcctcctacctctgccgcctctctctgcagccacatgggggtccagcgcctgtttccctcctgccaatgctgccattccctgaacttcaagcgacctcaccacagaccttcagtgccccctcctgtcaacaggaaggctctccttccagctccctttcctgccactcgtctgcctgattccctgtccattcctggggcctctgtggaccccaccctgtgtggggtctgtgcgagttgccagagccagtgaggagatggctctagcctcagagaaatcacacaggaagccctgagtgcctgggagacagtgctggagcaggtactaggcctggtggcaaagctactagctctcttataggctggagaggtgggggttgactgtcatacattggagggccacagctacatcaataagatactgttagtgttcttgcatcatggatgacagaattaaggttcagagagggtaagtgacttaccagaggtcacatagcttataagtggcacattcaaggttgacacctagggtttcctaaaggaagaattcttcaaggtgggcctggcaggacatatgggatatggagaagcagagagcgggggctggagagaatggcacagagaggtgacaggccctggagttagaacagaggtgttggtaggtggctgtgctcccttggcaaaagagcaccagacagagagggggaagggttcctgtctgagaggtctccaccggcctgtccctcatcctctgctgcttccttcacatgcactcacacaggggcttggtgggaattcctaggaccacgtgcaagggaaatgccaggagaagccgtgttctggggtatgagagccagccgctgagcccaactcacgtcctgtgggaagccacctcatggttagggagtcaccttgaccttgtctgagaccttaactagttaatgtgcatgtgtttgaattcctgcacatattttttatgtttgaattcctgcacacgttttttttttttactttcccctaagtaaaaaaaaaaaaaaaaaaatgtgagcaggaactcaaacatattcacgttaactagtaaagttaatgtgaactctctcctgagctcttagtttcgaagggaggtcatgtctgcacaagtcgtctaaggaacactgtctttagagcctggtctctccctgctgtgtgatgcgaatgagagtgggctggcggcccctgctgtgggcagtgactttggagcgccctcaggcaccccgcacctgggccttggggtggttttgaagcctagctatgcatccacttaccctaaaagcttttgacaatagagggccaggcactgtctcaggaggctctcttctagctgtctcgggggcagcctgctcatttttgttgagttatctgagtgaattattttattcctttttatgtcctgagcaaacccacatcctcattttattagtgtatttccaattattgcataatgatttccagtttagcttggtctgtgatatgaggacacttaatcaaatatctgtacgataggcctttaagttctctagggccagaagttttcccatcaattaagcttcaaagaaatgggttttaggctcatctgcaactgtgtttttgtgtttcttttatggccttcctgccttctcctggtggctttagagataccaggaaatgtgacgtgggactaaggtatttattagtgggtgtgcagagaatgggtttataatggttattacaacattttgaagtggctgccttgaagcaggacaatttatgtttccattacagtcaccttatgagcaccccacacacacagttctgccaggaggggacatctaccctggatcctgtggactccctgggatcaaacccctggaggtttcctctggagagagattgacccccagaaccttccacacaccccacactcaccccatgcctcagagggatgaaaatctgaccactaaaattcaaagagtatttctctgccatccggggtgctcctcccctggagccaggccaggcaaggtgccattctgggccttgactcctatagcaattacaggacagaggttatcagccccatttgacagatgaggaaatgaggcccagggagagaagccctgggcttccagcaagcaagcaagtgggtgctgctctgctctgagactccccatgcctggaacacgagtgtggggggaaacagcaccccacgccctccggcctatcctgtgagcactcatgcagggaaataagagcaaaagagagaactgggaggattctcaaaccacagtgactccaatccccatactttttcacactgagtggagctcccttccccatctctgaagaggagaacagaccccaggtcatcaagcctggtcctagccaggggcagagctctcagctagagcacctcgcacttggatttatttgtcatggtttctcttctgctctcacctaggcaaaggggttggatttcactggaggaaagttccagaggaagcaaaagggaaagcctgtgagcatggagtattcttgttcagtttaccaaggggctgtcctatggcagcctggactcagggtcaaaggaaacttagaggccatgcatgtctcagtagaagcaactctggacaaagccatgtgttcgttcctttgtttatctggcacatgtttgttgagtgctagttgtatgccaggacccccattggctcatgtcgatggtgggagggacatgtggacaagtagaggaagcagagatgatcgatgttctgagggggtgtccagggctctcagaatacacaggagactgaacccagccaggagtggtcaggatagtgacatgcaggaaagccacgtgccagctaagacccaaagccctccacccctccctccctgagagcaggcctgtgcccagttgccagaggtgtcctattcctgctccctattcagggttgcactaccatgatagggcaaagcagtcatcattccatcagtgaccacgtgtcttgagcagatgctgcaagccagccctctgcacagccccaccgatctgaagaggcttggaaaggggcgggggcaagattctagctgtggtgttgtagccccaaggtgatggtaggcatgtttaaggaactgaggtggcgcagggtcgccagaacgggtgtgtgagtggggaaggatgaggctggagacataacagggcaagtcagggagggcgctgcctggctccagcccgaaggcagtgggagcccccataagattcctccagctactgagtgggggaggattggtggggacatgatcggaggcatagtggtcatccgggggtgttaatggcttcctgaactacagcagaggtggtaggagtggtgggaaactggcaccctaagagacacagtggtagaaatgacctgagccaggactgattggctggggatgggcaagatggtgaggtagtgccaggtgtgcgatttgggaagcagggggcttgggtggaggggttgtcggctgaggctgggatgtgaaagaaggagcagtcttgatggtgagttccatttgggccatgttgagttgaggggcctgtgggacaatgtggggaaatgtcaggccaacagtggggtgggacatcaggagctcaagagaggatagtggatactgggctggatagtgagtagacaccgctccaagcttcccctgcaccagcctcgattgagggaaccgagtatccatgggggagcagagggaagtttctgtatagcttatgccactccacgtcccaaagaaccacagcttctgggaacctagaaaagcatggggcaggagaagcagccaaatactctcagcaacgaccacctttaaaagggcctgagaacaccagggtgggaagatggagcatggtggaggccagttccatggccactcttgtgttctcccgcaggagccagtccagagtgtgcactggcataaatgggtcagcacaccccaccagggcctctaagcatggagcagacaggaataggggcacacacccggggggtcatcagggccagggccagtgagtgacccgagtcatctagaaacatgactcaatcgacatttacacctgccaatcagacatctccccatgggtgacctgggagacctatgtgcacaccagggacccagagagttaagctcacactcggatacatcctgtgatggaaagacacccctggagctctcctgccagaagccctccgcacgcatactcaccacccaaaccccctcatctaaggccacacaattttaagtgatctgtaggcaagaaccatgactgtcttcacatttgatctccatttcttcaaacagtatcctatcctccaaaatgctcactacctagcgccttaaaagtcaaatcaactccactgagttggctcactttttaaaagatgcttctccagctcttatgtttgctttctgatggaggggacaactagccttagctacttggagcatgttgaaagctctgagtggtgtgcagcatcgactctgtaacatccagcctgaaacttggaggcataagctgggaaaatgtcctaagacatgggtggcatttcaaatgtaattattgctggtattcccatttggcagcccagctttcaagccagccaactccctcattttatatttacttttagtcccacactattttctgtgatccattagctctaggaagtcatttaaaagctataatcacggcgctttgctcaggtggatgcaatccagataaatggacccagatccactcctcgaagaagcctcgggctccaattcagcgctaatgcaccccaattaaacaagcagagccagctgcccccgtgagttctacctcatctgcatttaaaaactagggaaagtgtgggcaagagtccgttgcagaggacgcttaacagcccgcttcctagttggaaaatgtacctttggccttgcatttgggtcacaggtgcaagaagcccccacctagaatgcaatcatgatgtccctcaatggtttgcctcatcatcctggtgcacgctgtctggaagtaagcttgcccaccacagccccatgctggtgcaagggcaggttgggggctctgggccttaccggagaggacgatatcccaaatcgagcactgtgggcctgcagcccgccatccccgaacacaggcctgtgcccagttgccagaggtgtcccgttcccgagacaggggtgtgttgctgtgatagggcaaatcattcatcattccattagtggtcacaggtcttgagcacatactgcgagccctccatccccatggatctggagaggcctgggaaggggtggacacagcccctgccccggggtacacagtgtggtcatggaaatggtgctcactctcctcaagcattagatgctacatgcctagaagggctcaagggagacaagcacaggctggggaatcagaaaaggccccagggaggatgaaggacctggctggctcaatagaaagacaggcacacagggtcaggcctgcagggaaccatgggacagaactggctgtagggttgtttagatggagtgggcaggaggatgtgttgaagaagatgtgggggccctgatgacaagtctaggcagtgacttcatcagtcagcctctcacccctgccctgggtcaatgggggcagggaataaaatccgtaccatccttttctcaccctccttaacagaagagcattcacacagctctcagcactcaacgctgactgcagaggcggctgtggtcaggagaggggagcaggatgggagagagacagccagaagggaagtcgctcagccagctgtgcccacatcttctcatgtcctggggcatgggcttctggagagcagggctcgagcctcgcccccttctccacccacttcacacctcagcgtagtggaaggcagggtggggtcagtgcttgtttgttgagtgatgaggactgttcagggctggctgtgctcattccccaccccacccttgcctcctccccgagctggacagcccagctttgctggggaggatgcggcaagggtcagggacagttccagggcctcaaaatgatgagggctgctgtcccgtggttatggtttggagctcttcaccttgtgcctatttggtctatgttcaatctgggatctagagttacagtaagtcccggtagtaattcacatgctcatgaattcacagagcagggtaagctatgggttgcctatctctgccaagccagatatttggaatggttataaatatctcccactgtcaagtagaggtccctctgctccctcaatgcaaaccacatagcttgggatccattagttcattccaaataattaagaagcacccctcatgggtgtggtgggtataataattcagaaggcaaaactcttcctgtcccaaggatcccagtgttggtgcatcagggcccatcttcttggtgggcatcacactgcatgctggaggaagaatcagctttatagggcagttaatgttgaaagtcaagtgcagaatttggactctgattgccaccccccccaagaaaggggaggggagagctgttcagggaaggctttctagaaaaaaaaagaaattgaagctgtccccaggggacagtttaggggttgatagggggacatttcaggtagaggaggccaaccatgcaaggcctggagggagggaggctgggcctgtccgggggtggcttgctggccagtcaggcatgactggaccatgaggggaaggggcagaaaagtccatcttgattcctcctgggcaggagacccttgacgtctctttttgtgtcacgtgagctgaacagccagggccgtgaaggtcgagtcccagccgtgcctgagtccatacttcagtcctcaaacccttgagaagcctaggaggggagagcagggcagacgaggccagggcatggcctgtgagaggctcctcaggccttacacattggccctgtgtgctcagaggtctccaaggaggcccagttttatgtcagggcccatgacaaaccctcaccaagaacagactaactgagcacctgcctccataccgatacctctgagccaggagccacggccagccacgccttcaacatgaggaggtggtgccgtgtcagcacagaccgccaggtgtttcgggagccttgctcacagtgtttgtgtaggacaccccaaggtgtcctagctcctggactaagcctcctttagatacctctgggagctgagtattgggtgaggccaggacgccctggggcagtggggatcccctgactcttaggccttgtattcttctcctaaggctgcttggcaaaacccacacccccacccagcctcctccccagagaccccaggcctcctggcagccctgggttgaagggatgcccagcccaggatggcagagtctcagggaccagatgagctgccgccacttccatatcagtgaccctctcctgtgagccccgcaccttcccacccctcccccatgtacctaggcctgggcttggctgaggacaaatactgtctactcaaagcaactgctgtctttcagacatattgagaaacatcaggttaccttttttaaataaacatatcattgaagcataacacagagagaaaatgaataagtcataagtgtatagctcagtgaacttccacagagaacatatctgcgtaaccagcacccagatcaaaagacagaatcttaccagtgcccagacgcaccccacaccatgctctattccagtgtgacccacccaagcatacccactactcaggtggccttttgaaagaggagagggcatgactgtgacaaagcagaagggtggctaacaccagcactgccacttagaggggtgcccaggtagaggggaaacagggaagagagcagaggccatgaggtaaagaaaagcttcatgtgagtgtggaagagaacgacccagtgagcgtggcaggaccctcgccaactgtgactggaagctgcatgtagaacttgaagcaatcacctaggaacttgtcgtcatggtaatggattcagatgctttatcagtttggaactcggctgcaatatcagtttggaactcgaaccatttctagactctacgcccaaaggaagacagacttttgagtggaagcgatacaaattacctgtggagcagaaaacaaagatctcctgttggcactcaggcttcctcctgctctaggtgagacctcgggacctgggtggggcctggcccttccaatgcctcagaggtcagacatggggcattgaagggccctcttggctcaggctggggtccagctcactctgcccttcccaagagcagctgtactcatggctctgtgtctgagggccctgaagaacatcctgcaacatagatctttccagatttcctttcccttcagtctcagacactaccctctgcctgatgcaggaggccctgcgcagtgcaggtcagcctctgcctgacgtggagatgccctcgctgggtgtgactctgcttgctccaaagggtaccttgctctgggaatcggctacaggtcattcctgtcagttaaaagacctggaaatcccatctttgtgttccctacatttctcagccctggatgagatagatgaccagcccagacgtctggatttctgagccacagctgtgggcagtaaaaggcaggatgtgccagtgtgttagtgacaataagatttgcccagtaaggggcccctatgcctgggcagggtttcaacgtggtccttgtgctatagagattcctgtcctctcccatcacagttagagctggaaggctggaagcaggagagaaaggaggtggagatgggcagaaaaacaaaacaagaatgtggggcacaaaaggacaggcaggcaacggcctggctgcatcgccattgcccggggccccaggcctctcactgttccttggcctcagtttcctaatcaataaatgaggagcctggactacatcattccaaaacctttatccctgctcctgggcactatgacctgggatttgtgatgggccagctgcataggagcctccaagaggcaaacagggtgcaggatggggctggggctgagctgccgccacatgtgcagtgtcactgggatgcacacccagatccacagctgtgtgtgagagtgtgagtgagtgtgtgtgtatgtgtgtgcatgagagagagacagacagagagagagagacagagagagagaggacacctgcacgtgcaaggacctattctccagtgtcctctctgcacctgagcctatactgggtgccatgagcctccaaaagaaatgaaagagtttctcaccccagccttgtgaaactcttaccagagtgttatcctcaccaaacacagagcaccattcgtggtaaaaacaaaaatggaggtgagagtgtgattggcttatttagctgatggctcctgtttttattaggagccatgacatcatcaagtggcatttcttgagcctcacttaccagatgatttctcagtatttgcccttctgcctggaaagttctttatgaatattttaaccacattttcaaagcataagtcagaagacaggttaacacattctgaagcaaaacatgctaattctgtgacacgtgatctgcaccatatccacagggacacaggtgcatagggctcctgctgggatctcagatgggaagaccctcaggctgcaggccactggctccgcctctccggccccaggtgttctctgagctgtgtacacttttctttggagaatccaagagggtccctgtcactcccatcaactgtggatcctgaacctctcaaagcatctgaatccattaccatgacagacaaggcagccaggaggccattctcaggctctgggaactgataaatatggaggcagagagcaggctggagtcattgcgcagtgtgtgagtctagtgagagccagcacatctgccaaatcccatcaggctgctgctttcgctcctttcccggtgttcagggagtgagcagtgcagatgcattatggctgagatgtgtctggaatcaaactccatcgctggaagaggagggctttctgagcgctcggaggacccacacctggtttgctgtttatccccactgccaaccctccctcggcagccccggcttctcacactgccaggccctgcattctggatgtgagctgagaccacagcctgcgcatcagctcagaagcttcaggttgaaaaacccacacgttccgcctggcaccgactttcacagaaatgagggtttctgcagctccctccacgggctgcccacattttgataagtttcccgtgtagataatcctcagaacagcagtgcaggtgacggggaaggagagccttctcactctcctcccagaggctcaagccctggaaatactccaaagatctcccgaaatggctggtgttcgctttcagagttgtggagttttgttttattttgaccagggatttactgtcaatcgttcaagtccgagaggttaagataaatcttcaaacctcaggaaatttctctgagccgtctcaggtctaaaaccctctgtttgggtcattcttctctgaaatgccatttcctgccaagctcatgtaagagcacgtatcgccggcttatagcagacccgttttctgagagcattctgaggcagtttccctgtaacaccttttcttctaaagtaaatgaccccaggagccccttccgcaggtgaatgtggaatgtgttaacatttggggagttccttcctggagactgcagttcaatggcattgatttgcagtccaggcacccctcacatcagaggaccagaatctctgcttgttgtcttgaaaacccagtgactctttggcttggctcagaagctgaagatcaacacagaggagagaaaaacaccatgagctgccaggcctgtgagacgcccgctcagaaactgctactgccccagtctccccacctgttatttcagggcacacctgccctgcctgggggtgtcttgggagaacagagacaggagagagcccagttctggagaaggccctgccgggacctatgcggggctgctttccctctcagcggggcttgctgtctctaccccagtgcacagaggtgatgcctcttcctctggggctgctgtgggctgccttcctagaggccaggagcctccatggcccccaggcatgaccctgaatcccctgcccccctgtttttgaccatgctggcagagcttgcacacaggtgcacgtgtgtccacagcataaccacagggacacactcacacttcagcacatatgcacacacaggcatactcccacactgttcccgctgttctttaaaaatcacagtacctgggagtgtgaaaagaagtaaggccacagatttgggttgctcttgtaaatcacttgtctttaccccctgtcagacctaaagccacctttttatagcaaatcttttgtaaagcccccctttattatcttgaaatggatacatgtcatcaaatatgacatatatttgatatgagggatatatctaagttctatcccatatatgtgtggtgtattattctttggatatttgtaccctgaaatctcatgttgaaatgcaatccccagtgttggaggtggggcctggtaggaggtgattggatcatgggggtgggattctcatgaatggcttggcaccatcccctcacggctgtcctcacggtagtgagtccttgcgagatctggttgtttaaaagggtgtggcatctctctgcccactctcttgcccctgctcttgccctgtgagatacctgctcccctttcaccttctttcatgagtaaaagcttcctgaggcctcaccagaagctgttgccagcgctatacatcctgtacagcctgcagaactgtgagccaattcttttcttataaattacccagactcaggtatttctttatagcaatgcaagaacagcctaatacaatgtgataaaaaggagaaatgcaggaaaagtgatgagcataaaataaacctttcagtatgtaaatatctgggcaccagctgcactcatggaggccagatgtcagcacctacacgtggaaccctaagaatacaacagctgcaaacagaacctgttacacgtctgttatgttgacaacttgaatattcaagtgttgtcgctttagagatgggattctccaaaatggtgaatgattcttgataaaatagtaaacagaatctacaattgacagcagaggtgcatccttggaatgcctttgccaaacccggggcaaagggggtgaatgtcgtgtaacacattagattctaggctcaagtaatagtaaccagatgttttgctgccgtgagtgagacatttaaaaattcagatgagatgccaggtgtgatggttaatactgaacgtcaacttgattggattgagggatacaaagtattaagcctggctgtgtctgtgagggtgttgccaaaggagattaacatttgagtcagggggctggggaaggcagatccacccttgatctggtgggcacaatctagtcagcttccagcgaatataaagaaggcagaaaaatgtgaaaaggagagacgggcctggcctcccagcctacatctttttcccaggctggttgcttcctgccctcgagcatcagactccaagttcttcagttctgggactcggactggctctccttgctcctcagcttgcagacagtctattgtgggaccttgtgagagctgcaaacagaacctgttacaggtgtgtaagttaatacttaataaataaatatatatatatctctctctctcttttgagttctggccctctaagagaaccccgactaatacaccaggccagcagaagtttttgtgcaggatggtaccgtgaaggtcaggatcgctaggacccctggccccacccattaagtgctaccaaggccctccaatcattgtgacaaccaaaaacatccccacaaaattccaaaacgcctcttggggacagcactgcccttgttgagaccgtttatagagactccttgcatgtgcgatgagtccatgtgggagctaagtgctccctttgcctgacccatcagcctcagtctggagccagtaaccctcatcttgatcactcgcggaggaagcgacagcctcagacccggccgtgtctctatggatgtgcccaccactcagtctagtggccactcaaaggccacagtagctcaagctcaaagcagctacatttctggacatcactgacgccattgcctcgctgacgctgagcaaagttactgccagctccacagccggccttttccccttagttagatgtttgggaggatgcagcctcccaaggaagtcttggaaacaaaattaataaaattaaacaggaggtggagaaggcacccacactcccatatcccctccgacttccctgcctggtgactgacctctagtccagcactactgcttctgctcttggggctggtgacagggagagtgggaggagggctgagctgctggacagggcaaagggggagccggagttcataagaagctgttgcccaccttccacaaggaatgctgacctgttagggaatctagctggtggaggttttccactaacacaatagtaaaaaataaagttcttaataccaggagagctttagcatttattcatgttttcatacagtgctctttcactctggggccacctgacagatctgccagtcaaccataaaaagtatatgtggatccctctcccagggatccaaccaattttgctttctctaataggaataaaagagaggattgtaaatgtcagacagcagattgtatagcaacatcaattgaaccaggcattcataagcaaatgtaccatttatctaacaaaggtctgggtggttttgttaatttaaatgacctgatgctggggtgcaaattgagatgaggcattgtctgcgtattcaggtgcaagtggaggtggatattgccaccagccttggagtcggctggatctgctccagtgcagcacagccggggaaccaggcgcaaggtctgcatggcctcgtgtgtgtttaaccctgggtaaaaggccatgtcaagccttacacatgcagattctgtttgtggttccaaagtgagccttgtaccttcaacctagaaaattcaaaattagctgagatgacaaatatggacactccagggaaaagaccagatggaaactgaccgagaatagtttggcagccttgatgcaaggccctctttgaatcctgggaggatgaggggctaaatctaagaggctgtaaccacttgatttccctcagccagtccctggatgctagagtacccacacgccaaaatccttatgtaggatcccaggaccttggcatggccaaatgccagcaggtgacctttgagagaaccaaccctttcagccgcaaactcagctgcctgtgatggctgtcagctcagctcaacaagagacagacccagtcctgtagccatgccctcctccccctgaagcccttatactggcctctgtttcccaattagaggaaccagcacatccatgccttaccgggaagcaagagccaggatgttggaaggaactgctcggctctgtctctgggtcttggctgagaggcgggcaccctccagctattacccagtttctctttctgatttaatccctggtagttttcccttccaggcccctcctgagagccagtcagctctcaagcaaggtggccaagtgagccctgtcaggtagggggaaggtaagcatgtttgctaaaactgtgtttcccaaagcgtgctcagtggactatctgtgctagaatcagcagactcttaaaatgcagctttccgggcctcaccccatacttgctacccttctagaagctgaaaatttgtttctaacagacctgcagaccttctagaggtgagaatctatagcagctctcccataccgttgcgtttcctcagctaggcctgtcctgggcttcctctagggaaagccagagtaaacaggttcttcgttgagtttcctgaggccctggtgttatgtggttgaaagaccagggtcaggagatctgggttctgatcttggatctgctactagtctgccccgtggtccagccacgtcccttccccaccctgggcctcagttttcccatctgtctaatgactgcatttggctcattgctggttctggtgttgggactaaggagtgaggagtgttccagggaaagctccaagtgatggaagggacaggaggcaggctgagttcctccaggccatgggcaggctgcagcacctggtgaaggtatgcccaccgtaggtccctgttagcagtgttctctaagaacgtgaagttattcacccaagagatacaaagatgctgggagcagtctttgctttaagaagctcagtctaggagataggacaaggacaaacccctccaggctcacagagccaaggtccagagtgtgtggtttggaatggatggaaacagctctgtggaactgggccttggcagaaaagtcagatttgaagagagggtctgccaggagtggggcacctgggagcaagctctgcgggcgggctttctggcagggagtgggaagtcagtggagccagactgggaccactgggagggccttcaaggctagagtagccagtggttttaggccaatgacaggcataaacaccgccacagggtgctgagagaaggggatagtgacccactcacttagaagtcacagaccccaggggacagcggcagtgggttaccaagtggcacgacttccagtacacctgtccatgtttgtttggggattgtgagaagactgtatcatatgtgtgtaacagtctcttggaattttcagagttttgtggctcagtcaacactgtcagtgaaacgacatcatgttagctaaaatatatcttaaagataagcccattggttttggcatttattgttaattgaattttcccagaaatggcagcagaaagattgttaatgttcatgaatttacatcaagttaaacatctgttcctcttaagctaaactccagcaaagttacggcagctcctaaattagagctgggagtaaaatcctgcttgttctttgcgcagcttagcagtttcaaaatagacctcagaatgacacatcacaactgaggcccctgtaacgcagccgcactgagctatataacatgggtgccagacaattaagccaggtttttgctttggtggtgaagatcgaagctttgctggggcagcacatgacatgacttaccaggctaatggggaaagtgtgggaaccagtgttgctaatgtctgggggacaggcagccaagaggatgggggcatgtcctgtctctcccctgggcctctctggggggttctcaggtgaggtttggggatctgagctctagccaccctgccaggttgaagaggggctggagcccagtgactgcagctccagagagtggctggttactatgtggtttctgcagggatggcctgtgtctggtttgggaagagagatcctcaccccatttgttggcattcagagcagacccaccatcccccacccaggcaagtctttcttccccatgcctttgcccctaggtccacgcccccttccccaaagggattgcttccagcagtggcagctgagctctttcatgatgttgagccatgtcctgcgttcccctctccagtacattttggatattcttcaaagggggactcctgagagtagagtgaccccaagaagggagattccagcaccccggagactcatggggctgtggtcttatagtggcctggggattccccccacccaccttgaccccacattctgcctgtgtataaagctgtccccaagaacacagatggtccacagggtcggctctgttcatttactgatcagagccggggcaaaaaacagggtctttcctgaagctatgccatagccaaattcatccacaggcctccttacctgggtggctgtttcaagcacagggcgctcagctggcctcttcacagggtgatccacggctctcctgaccagcaatgccaagacaagagggcagaagctttcctcctcctctccagaagcaattcccaggcagctgccttgtgcccaccacacttctatgcaacctagtgtccagagaccaccttgccaccacccctagcctggccatgctggagttcactccatgggaacagcattgcaggttttgggttgtccccactgggtgaggtatggaggtctgggcttcagtgagcatggccacatgtaccacatggtcagcatgccccccaaggaattgacatgatgggtgacacaggcactagcccccttcagagatccagacccgtcaccatggtgcagggtggctgggattgtctcctcttcagggcagggccgtagccactctccaagcccacctgccacctgtcttccacagtcataccggtaacagacactgaatgagccccttctatgtgtggatgctgggccaggtgctgggggtacacctgtaagcaaggccccactgcactggaggagctcacagtctaacagggagcctgatgatccacagtggatgaaaaagtcacagaaattgaaggctggagaaggctggcaagagagaacagggcagcacacgagggtgcccgttaggcaggattggtgtgttaggcgagggaggctgaaggagttggtgaagaaacaccttgcagtgagagagtaggacggggcagcaagagagagcccactttcccgccccaccaccatgcaggtgcctcacccctgggatccaaggcttgggccttgaccacatggcctgtctccctctcagaatctgagctcccgacagcctgtgtagcactttccacattgcccacattacacaacgcctccctccccttgactcttcggagtctcccagccccacccatgccttttacaggagcttcacctgccacagaatgaagatggtccctttgagcacagtctggcaggggcacaagtggctgatggaatatttacaatgtctcccttgcttccctttgttttgcaatagaaagtgtttctttgatggacatttaattccagagactgctacctgctacctatctccctttgctcaaaaattaaatgtggatgtgcctgttctcctgctataatcatcttcctctgtgtgaagggagtgcagtgggaatgagagaacattagaatcttcaaagagggacaattattgagggaactagattaatgaggtgtcataacaacttagccggatctgcgactgacctttctcatggagaacgggcttgataaatgtagttcattaccaagttctgacatgaaaataggatcacactctgggctcctcggcaagctgatcaatattttatctgccaaagcaggcctggtctgggagcaggaggagccccacgcatgtgctggcaaggagcctgaggccagggccaggggctggccaggccagccctgtggcatggagggcacccaggctggcaggaaggtggctgagcccttcacagagcctgccaatgacgctgtcagtgtcaggcttaccaggacatgcagcctctctccccaagaagccccagatggggcatgtgcactggcggtcaggagggagggagaggatcaggacatcttctgtcttctgtttagccatgagcactgatttagttgccaacctgtcccaggccccacagtaaaggggacaaagacaaatgagccatacccctcccttggggctttgagcccatctcaccaagagaagaccccaggcctcgccaaccacttgctaagtcctcacatttccttgtatgctatgaccctggaaggcagtaagaagctattattatccccatgtgaagatagggaataggagtaggaagggcaggggagtgaatgcctttcctaaggtctcacagctgaagtcaggtggtctcctgatcctccacccagtgttctgtctgaccttgtggtgactgtcattagcagtgttaatatcaggtagacacggcagcctaagatgaagtctgtgtccccctgaagaccttagacaaggttgttatagggtgagcccatcaccctggctccagcttcatgaaaatgccctggagccacaggactctggtcctctcattcaacaagcatttcatactgtaatgctgcatggggagctgtccacttcaactcctgcctgctcagaacatgtaatcccattaaggggacatagcagatgctgaaagccgcccatccagcttccctcagtcaaccccagaggtgatgtgcagcttggatggacgattccccataacacttgccaagagcatccaatcccaggcacctgcagcttcagcctgaggacattttccggtctcaggcgtggactcagtcctcatttgggaggtccagaactgctagctggaggtggtgaattcctccaagagcaacctcagctaatagggatggaagtcagtagaaaaatatcctggctccctcccacctcagtgaagcaattctgcggtgtgttctacacagtccctctgaggaccccatgggattgaacccccattgcccacggcggcaacccactcatgagtgaaccctttgttggcttttctcccttcccagtctacttcctgttccttccagcacttcttgggatcatcttcaaatatgctgcttgcccctagatcctcatctcagggactgctttgggggagcccaaactaaggctggggcaagcctcactcagaaaggatttcatagcaggcagaaaggaaagctgagggagaaggcagtcccgtgtgggtgtgtgtgggtgtgtgggtgtgggtgggtgtgggggtgtgtgtgtgtgtgggtgtgtgggtgtgggtgggtgtgggtgggtgtgggggtgtgtgtgtgtgtgggtgtgtgtgtgtaagtggacaagcttcctacagacgaggtggattgggcctgaagacaggaagggggtggggcagcatgagaaagcgcagctgtgttcagagcatagggaatttccagctatggagggggcttccctgaaattctccaaacctcactgtaaggcttgacttagccaaggttaccacaaaggcaaagacaaaatccccttatttggaacaacacaaagttctctttacctggaaaccagcaagactcagagaaaacactgaaatgactttccaaacatgtgggcagaaacttgtgcagtccaaatcacggcggtcctgcccactcatgaagcaggtcccctgcgggtcccaacctggcagcccctgctgagcctcattcaaggcatggacgtcaaggttatatgcaagcatcccaccttttctctggaagagtcacgcctccggattaatcaatgctgaagttcaactgtattctgagtctccccatcccaggctgagttagagaggccctggcaatgggatccgggccccagctcagggctccttatggcattctctcgaaccattctctcgaactcctgacctcaggtaatccacctgcctcggcctcccaaagtgctaggattataggcgtgagccaccgcgcccggcctgccactatcattctcaacatcatcttgaccatcacccacaggggcaccagggaggagtggggtggtccccaagcctctgccacacaccccagggaccttccctccgaaggagtaaagtatcctgtggaccaaggctaaggctaagactggaccctgcccctgtccggagagatctgattccctccctacctgggagccaggcccaacacacacagtgtcagggcacggagagtgatgaaggtaaggggtgccagcttacatcaggtgatgtttaagcagaggccaagatgaatacaccaggtggagatttgggtgaatagcactccagccagggggatagtcaatgccaggcccctgggcaggagcatgcccagtgatcagtgctgctgaagtccccttggtccccccataccccccacctctcttgtagtcacctgtgtggaattgctgggcaggtgggcagggctgactggggtgaagataagaaagacatgaaccttgggtgttgacactttcttgcccaaaatgattggaatttttttttttttttttttttttttgagacggagtctcgctctgtcacccaggctggagtgcagtggcgtgatctcggctcactgcaagctgtgcctcccgggttcataccattctcctgcctcagcctcccgagtagctgggaccacaggcgcccaccaccatgcctggctgattttttgtatttttggtagagaaggggtttcaccgtgttagccaggatggtctcaatctcctgacctcgtgatccgcccgcctcggcctcccaaagtgctgggattacaggcgtgagccaccacgcccggccaatgattggaatttgagaagaataggaggaagatcagaaaacaggtctcggagcccgcacagcagacgagggctggactacgtgaaagagctcatttcaataatgggctcagtgtcactcatggagagggcccagcttcacatctggccagcagtgtgttgacagcagctgcatctgggaggtggatttcgggatgatttattttctttttctttatatttatttgcactttccaagtggttctctgatgggcatgtatttcttctagaattagacaaatgtttgaagctggaagaggggagggagcctttagctgaagacatgtccggtggtgtccaaaatgcccagtgcttcacacagctaagtcactcctatctgaccccacagtgaaaccagcagggggcaggaatgtaaaaataaaactggaatttggtaacctatgactttgacacaccttgctaggaaaatatctatcctggaagccaaggccagctgtgagggaggaaatctatccagggagactgagctggaggctgcagctttggggcatctgcctctgggggctggaagaaggcaaggaaggaagttttccctcccccactccacctcaagccctgtggaattcggatgacaaaggcagggagtgaaggcagggagccaccaagagggcagcccttggagatgaaggctcaaaagccttcccaaaaagcgagtttggactttgggatctcgagtgatcatctgcacagaagcagagctctgagcatcaggctgcctttcctccagggtccacggcccttccccagtgctgtcgggcaccagaggagctcagtaatttcggacaaatgacttcatgatttaagtttgggcaaagttctctcttgcaactcattaaagcacagttgctcctggggtaaagaaggatttaagattctgttcctggaatcccttggttcatctcaggaccccagtggcaagcttggcccgggcatggagtgccctcagtaaagggaagaaatgacgaaggaagttttgaacagcatgatgtacggtgccacacacttccccaaggccttggaggctctgcctgggttgtcccactgccctctcctgcctgtcttgtttcactctccacctgactcagcccctctagcccagccacaccagctttcaccagtctccagacgtgccccaccatggctcctgcacgcgcagtcctgctcctggcctgctcttccctctgcttcctcccacaactcctcctcctacaggtctcatcctgaacatccctcccttggcctcccaccacaggcacccacagtgcccaggactggaggctgcccagcatcgggcacacagtatgtaaataaacactggtaaaaggatgggagtggcctggacagtgtgggccctagcagggggtgggaccgtgggctcagggagctgatgctggagacctggagggcccacccctttcccccagaagattgacttctagacctgcacataccttcctgaccagaaggtgtctgttgggcagttgccagggtgaagcagccagaagtctgctctcacaggcagctgtgaggatgtgaggtggggccgagcctggggaggatgctgcagcaccccacttccatcccagcaagacccacctggatggtttcccccacctgccagtgttggaggtgttgtccagctgcagacccctgctcacagggggacgccagtccgtgtagctctacagacttgagaaatgggtttgccagctggtgaccccaagaactcccagggcgctctccatgcttaggccagcctggccactggggtcctgagacgaaataagaggctcccagaaaggaatcttgcccagggcagcaggcagctcagaagtggtttacgccccaccaaggtccaggaggaaggttggggggatctgcaaggatggggcatcctgcccttttgacccagcctgtcctcaccttcaggtggccctgctgcagcatgttcttcggagcctgattgtccaccggtgtttctgagtacagcctcttcctgacaccatatccacctgctgtgtacatcaatttttcagtatctgggtataaatgccccccactccaggaagtcctgggggctgcagaaatgctggctcctgcagaccctccacacaggcacacatccatctccatttaccccagcagctggccccacctccactttcattctgtacccccacttctggtctatttgccaggacaaaatttcagcctctttcagggagtgaggagctagactcaggcaaaactattcctcctcttccccaaaacttatccttatccaggcccagaaaaaggaaaaacccatcaagttttgtaggggcacaaagccactattttcaatgccctgtagctctacagacttgagaattgggtttgccaactggaggccccaagaacccccaggaatcaatatcctaccaggcaaaagagggatgcaagcaaggtgagggtgtgggagagaggcgttcttgtcagagcatgaagactcccagagagcaaatagatctgattatattgaacacaacaattgatttttttctaaataaacatgcaggaggaaatggcaatgggcatctgtttctgacagaaatcaattgaccccaaattggaagaaaatctggaaatacaaacaagcacaagaaaaagtggttgggctgtccaggcttatcaagggagggtatgagggaggaaaagaggaagggaggaagagagaaacagacagacagacttccccatcatccctttccccccagtagcttccctgatgattgctcttcagtaaatgtggttcccataatgtcaagggagagagtagctatcatgttatgagcccttactgggtgccatgctggtgcaaaggcctgtatgtgcacatcttacttaatcctcgtaacaaccccttgtgggaggcactggtatctctgcttcacagatgagatcactgaggcaccctgcccaaggctacatgcctgatggcagcagagctagagctcaaacccaggggacctcagagctcatgctctctaacacttctttctattgactctccaactctgggatattatctcaggccctaaactggccttggaattaaggagaagagccccaggctccagcaacccattggccttcaacctggaatggtcagtgaggagcccatgcgtattctccaggattcagcaaagccaggcgctggaagtactcatcccccagggagtcgggaagtggggctggaggggctgccctctccgctgacactcctgcaatcccagtgtatgggcgttgccctgcgtgatgtccatcctagaagcccgtcaccagcaagataaactgtgccatgctgcaatgcatcccaggctttacttccccaaacactgcatggttctgatgctgttcagcaagcgcgcctgggataaaacgagctgtgtgcttcggttttaacgttgtaaagcttctttttgtttcttggtcatagacttgtgtatatgtttgttttgaagtaatccagctctgggagggtgcctaattaacataagcagggcttattagtcctgttaactaaaactccctaatctaggaggccaagtattcaaaagcagcctttaaggtaggattaaggcaaaaaccagtgattacaaaatggaattgggggtagctttcctaaagcctctgtggggctgccgctatatattccgctggaagaatttcccattccatctggcagtcactctagtctggcttgtagtggtgctcaacaaatatttgtcagatggacagattccctccagcatttgcatcatgggcatgcattccatgttccatcaatatttatgggatggattggtgagcagaacacaaacaagtcccatcgacgacagttgcaccgtgcactgcacatagtgaacgcctggtggctatttgtgagtgagatgaatggaccagcggcaagaatgttctctcaagaccacgggataagtctcaaaataataacctcaccttctctttcaggtgacacgtgcaccatggccggctacgcccgcttgaagaatgtccttctggcactccagacccgtctgcagccactccaagaaggagacagcagacaagaccctgcctcccagaagcgcctcctggtggaatctctgttcagggacttagatgcagatggcaatggccacctcagcagctccgaactggctcaggtgggcatcgtgttcagtgaaagtcacatgatggaggaatccagttttccatttcccaccccggccccctggtgtctaagagcatgtgttcaatacctctgagaacatctcacaaacaaaatgaggtcaggttcttcccaccagccacctttagcctctatttacaaacaagctttcaggccctctcagctatctggcaaaaaactcacttcagagggcctggtctctgatgttttgactaggaaatcaatcttttcttccttgagtaggattagttactcagcagaaaagttacaaggaagcagtgcttggtttccattgaacaccattggagctataacctggaagtccccaagtcttctaccttaggacatcactgctccttagtatccaaagatcaagaacccaaacctcggactgcttgtttgcagaaagccctgtgtctacccgtcaacccccaccaagccctgctctcatttgggaaaacacttgcattacaccctgaggtttgcctccctcccctgagactgcagtgttcaacacagcacacatgtcctttgtcgagctacaaggtggagcaggggtagttagtgtctgcaacatagaaagcaaggaaagagtgacctcactcactggggccacagccactgccagttgcagggaggagcctgtagggtcctgatggtagaaaagctggggtgggctggaggggcctgcattcctacttctgcttactggtttgtttctaagggtctgtagccctagagctgcaccaggcaggtacaagatctgcaaggagagtgagatcagcctccctgagttgggtggtggggggcggtgggcagcctttttcttgtgaccacagactgtccacccagtggatggataataaagacaggtccccacctttgatgccaatttaaagatatcttaaacatggcacagggaccttctcaaggctgtggcccggtcattgggaagaagtggggtggggagtgccctaacattcattgagccatgtgcttgacattgagctaggcccttgacctatgattaataaacacagaagagttcgttgttatgtaggatagtggcaaagaatgcagactttagagtcaaactgcctaaggtcaagtgctgcgtccagcatgtatgagctagtggaccttgggagacaatgtcgtttcgctgtgcctctgtgttcagctgtgaacctcacagggtcatcatgagggttaaatgagctaagatagtgaatggcttagagtggtacctggcatgtggtatgtttcttttttagacatggtctcgctctgtcacccagactggagtgcagtagcgcaatcttggctcgttgcagcctctgcctcccaggctgaagccattcttctgcctcagcctcccaagtagctggaattgcaggcttacaccaccacacccagctaatttttgcatttttagtagagatatggtttcaccattttgccaggctggtctcaaactcctgacctcaggtgatccgcccaccttggcctctcaaagtgctgggattacaggtgtgagccactgtgcctggccacatggtgtgtttcaatagagaggtcatcagtattgttgccatcatcatcatttttattattattatttcctccttaaatctttcgaccatcctctgctgtaaggaggggacgactattattccacttcacagatattttcagatgaggatactgaggctctaagaaatcagacaacttgcctgagttgttcactgcctgggacatgatggaactgagatgaaaccctggcaggctgacttgcatgcacctgctctcctcagggcacttggaatctccctggagagaatggctcccaccaagaggcaccacatggttccttcaaggtctgtagggacaacaagtacctccagaaccctagtaaggagtagccaccagaagctttggaacataggccctccgtcccagccagtcctgagcctgctttcaggaagcacgttgggaatctcagatgactctgctctgttcactcatacctgagtggctcgcgcaagcccattcaaggcctgcatcccaggaggcttgctgcccatggcccccggggcaaccgccctgccagcatgtcaccacctccatcagcactaggccccagctctggctaagaccctgaggggcagggccagggacctgcaggtgactcaggctgctctgggaaaatcccaggtcctgatagttacagctacttgcaggaagaaccacctggcaattcctcaaactaccgagcagggagcaccaagggcaggtggcatcagcttgtcttgaacagaagctgctatgagctcttggtatccaggcccacatggctccaggtaaacagagccttaccaggcacttcattctaacctggcagatatgtggcctgaggcacctgaagccattaacaagcgtggtaattggacaatgatttcctctttaaaatttaatatagttaaagtccatttcataaatctgccaagcagagcccggctaaagtgggcctttccttgacactgaatcaaaggtgctggggaagaacttgtcagtcctataaaaagttaatcaatttccaatgcagaaatagacaaagggaaatttccatctttggaagattgatctcaggcattatggttgatctcccttttatcgaacactcttacttgcttggtgaagggtcatttttttaacattatcacattaaattgcctttaatacagcagaccaagctgagaatgttaaataaagagaaaatgcctctgcccccctccccccacaccaaaataaaataaaatcattttctttcttctgagatttccttctgagcattttccctgcaagaccttcagttccgagcacactggcttctggctgtagctccagctgagtgagggtgcctagaatttctacccttagttaccttgggacgtgtggctgatcatgctgggcagcctctgtgtcctatggctcagaccacaaccagagaggagtttacgagagcctatgtctgtagcctccgtgccagagtcacaagggtggacatctgtgtcctgggcaggacaaggcaggcaggggggaagctcaggtctaggtggatagaacggaggggtctgggagtgtgctgtgtccaggcagcactgcctgccatgggtaagggctgatgggtgggtgcatgatgcagcagtgacctccagctctatgcagctggaagctggcagacctctgtccccacactgagttcagccactgtttgctgggtttatccgatggggtcttttctctcctgtctccccatctatagcacacagcagtagagcaggtggcctcaaggattcccatcttagactgtctgggtctgtctgcctagacaaggaaaagacacacctgagctctagtctagagtctgccccaagcactgtgtgaacctggggaagccacttcccctctctgaaccccagttttctcatccataaaatgaaggagtcagacaagacaaaatcaaagagcttcaggtacccctcaaggcccactgagctgtccctggattccctcttggcctgagtcattttcatcaatgcctatgactctaaactcatctgattctggccttgttctcctcctcaccccacagcatgtgctgaagaagcaggacctggatgaagacttacttggttgctcaccaggtgacctcctccgatttgacgattacaacagtgacagctccctgaccctccgcgagttctacatggccttccgtaagttgggtcccagtgggaaaagggcttatttctgcaggtgcttctgcaccaaaatgctgttgggtgcctggagtctgtcctcagttgtctcccaggttggtttcttatacagaggaaagctggtgaatttgttctgcaacaagcctgagctttaagaaaagactaaacggagagtggatggggccagagagggcttgccctgttcctttttaataaagatttttctcgctctttgaggggcccaggactgtaattgaagcatagctgtgagggcactgtgaacaccctttgggggttctatgactgaaggagaaggaagcagattttagggctatcctcaggctagggcctggccatgtggggagccctacctggagaaaaacaccctgcaggagggcctggaggcttggccatgcagcggcagggagcagtgactacccaaggacaatggagagtgagggtccaatgtgaagagaggcaggggatccctggagaagaagggaaagtgggtgctgtttgaaaacagaggaggtactctgagtgcccctccaaagagtgcctcatgcatatgcaagtggatgggatgccttcaggacctgtatcttttacttgaggtgatcttccaagagattacattaaccagaggtggtgctgggacaggacttacaagaaatgcaagatacaagagccattcgtagctccaggcaggggtcagcagagaggagaggaaagggcagtgctgggcccacgctggagactagaggggacatccttggcccaaaagagatgaagccccttacattagaagatgttcaagctctgcttaaagtgggcaatgcatatacccttgggtgtgacctgccagctcacagttcctaagtgcaagccctggcattcaagaggtgggtgcaagcccaccccacccccaggggcactgagtaccctgagccacagagcctggtatcctccctcaaccccagcctttacctggactcccgttttccagcaaagtattcctgcttcagagtgacatctctttgggctgttgctattccacaccttcacaaggcctgaagagggatccttgtgatttgttggcaagaagggctcttgtggcaaatagagaggtacttggatgacataagaggagagaagcaagcatgattcttccctatgggcagtgtccatgagcttgacgtggttgcaggggcctttccagttcatatcatccttagtaccaaagtccaccccaggttccagagctttgcttgatttactgtgactgtgcagggtccccgtcatcctcctccccgcccactagtcaaactcatacctgcctatgttggttcataataaggtgagagtgactggtaggcttatcctgctgcggaggtgtttgtcttgtgggccaaagagattatttccagaaatgcatttggaatgtgtggaagtatccacaactccccacacctggttcatgagagctcattgttaaattttcaggaattttacaagcaaacagttagacacttggtcgctttaaattggccacgttgagaatatttacatcatagaaattcacaccacacatatgctaccaaaaaggggaaggggggacattttttcttctctagggagccagttgttatacattgacctgcatgtcactggacaagaccctctctcctgccctcggagtccacttctggcaatatcttccccacccacctcccctcactgagactccttgatgattccatggaacatgaacaacagtaggctcgagcagctagggcaggttacaggaacagcagctctctgagtcaggaaagcagcaacatgttctctggggatagttccaagacattcccaaaaacactctctgagcctagacccctctgccaaaggagttatgaaggaaaagctcagtgcatttttagagccagaggccaagactggacttcagggatttgtggggcataccaggcatcattacttaatgtcccagatgccgtcatcaagcagattatagcactgcttgggcaccatcttggtgcctggtaccatagcagcctctgctttatgagcacagttcccatgagtgggtctggggccaaacagcatgctcttggctttgctctcaaggaaatggaagcatccctattgcctatgatgaaagagaaggcctctccagcttccctagtaaggtcattgtaaacatgagctaccctggaaagggaaggacgtcattacctgacctccagccacatgtctcatacagagcaatgtggtgtcagctcccttcgttcctggattattatttggaaagctttataatcatcatttttaaagcaaattagattctgctgtcgccttggacttgttttgaaccagacagccaaaccattcatcacagcccagcccaaataatagatatgcaataaaacgtaaactcacagccattaaggaagccgcaaaatgagttaacccccactataaaggcttgacatgcagccacttggagcatatggggatcaatggtttttcaaagtcacaggaactctaaactaaattcccatagctctggtaatagatttatggttcagcgaattttaaataggtaattgaaatgagacatataggtacaagttattacccagcaatcgatgggcattaaagaaatctcactaaaacccagaaagtaatatctcaaacatttcagcaacaacattctggatttaattttaaaaactagagctgatgggctggcagaggttgaggcattagcattttattttctagtctctattttgctggcgtccttgggtataaggcagggtgaggtctgtggggtgactccagctcagtagcctaccgatgcggagtcaatcgctttactaaaggatgatgggtttggggctgttgtacccagagaaggaagttgtatttatcagtttttgaggtttgtgggggtggtctcctgaatcatgtcttcccatgcagctggcctggccctggctgggccatgcttgccacagtctgcagctggtggagggtgatgctaggagtcccacagctggtggatgtctgtgctgagctggttcgtgatggggctgtacccccttcctggctctgaggaacaggtgactctcctccagggtggcaggcagtgcctagtcatgggagtcagttaagtctctttctgattgtcagatggagccaaggctcccaattgcctctctctgtacagggacaggaatgaaatatgagggtgcccccacttcctccttttgtcaactaaacgttctctttgcattgttttggcttcccaaaccacaggctgatctaggaactaaaggctcagtgtccttctccagcagtgccctctgcctctccttccccacgccaccccccaccaccccaacaaggagtagtgccacctgtccctgccatggcagagacccaggctccagggtcaccataagcaaggtgtgtgctggccctgtctgttcatcacagtaaattaacctcaaagttgctcatctaaaaagcttcttgatgatgcatggtttttgcactgttctgagtgctcaggttgggatcaggggaaaacacgttgctaaaacaaggatttttctcacttcaaattcattgcaagtttcttctgctttttagaaaatagttgtccttttaattactcctatgagatcaaagcccacgaatgtgttggatgcatgggaaggttttgagcagctagcagataaagggcttcacgtgtgaaggtccggtgaccacacaggcagggtgtcaggaggacctggggtgctgaatgtaggggagccagacacccttcctcacctctgacatgtgtaagctccaggcaagcagaaaggaaaacagtgttttcatctacagcactaccactacagccagggcaactctatgaaacagatgatatggtcacctggtgaatttacatctgttttttcaccatctctgttgcaaagtgaagggatggtgcagtttcgtttaccacaccactatcctttggaactaatagtgcctggccccataccagacttccacacatgctatctcagccaatcctcacacccaccttgtgttgagcaggatggtaaaataagcaaccgcaagcatcctcactacccagatctatctggctctttatctaggtagggtgagttcagacaaggagcttagatggcaaggatactgctttgttctactccatttcattcctgagttttggatagtaagtaacaagattttaaatagcatggggttcatcaaaaattttatctgaatttacttggctcttgaatttggagagcaagcaatgcctatgggctggtttcagttttggctgaagccaagaccatgggtgccagtgactccccctaccccaaaggaagacactggttttcccacacaggatttgcaaataaagtggccgaagaactgattcactgcccttggtccctcattttctcaagggcacaaaacagttaaagctggagtggccaagggaggaattgaaaattggcagacaaggccgggcacggtggctcacgcctgtaatcccagcactttgggaggccgaggcaggcagatcatgaggtcaggagatccagaccatcctggctaacatggtgaaaccccgtctctactaaaaatacaaaaacttagccgggcttggtggtgggcgcctgtagtctcagctacttgggaggctgaggcaggagaatggcgtgaacccaggaggcagagtttgcagtgagtggagatcgcaccactgcactccagcctgggcaacagagcgagactccatctcaaaaaaaaaaaaaaagaaaattgggagacagaaggtgtgagtctcaccacctcctcccagagacagagttgggggtgctgtcctgacttcaagtacatagagagggcttcaagaagcccacttccacgtgagtctcctgaggccagcgctggaggacagggttcacagtcagtgttccatttgaatgactttgcttgtcaatatcgccgtagttagtaataggctcttagtactccagttgtataaagtgatacccagcatttaacatgtgtcagcactgtacactatgtccagtttcacagatgaagaaactgaaactcagagaagtagctaacccaagatcacatagtcagcaggtagcagagtcaggatttagtgggcgtgtctgattctagaactttctcatgcatttaaacaaactttgcaacacatctgcattctccgttgaagagaatctcactgtcctcacagtgatttccctaaacttcaagccccaactcaatggtcttctcctccaggaggtctttctcaatttctctttcctccaccaagccccacacaccttcctctgtgtgcccacagccctgggttaacaaggctgtggcctgattattaagagtgtggactccagagtccaagctagacctggttttgaatctttattctgcgactgactaactgtgtgactttggacagttccctaccagaggttaaactgggctttaattttcccatctgtaaaatgggaataacaaccgtgcacagagttattcaggactaaaggagctacttaatgtaaagtgattagtagcatgagactttgcctatagtaaatattaggcaaacattaaccaggtcaatgatggcggcggtgagggtaatgatgaagatttctgtgtgtgccccatcaccctgtgccatgccattgttgtccttccccctcagggaccacaggctccctgaggatagaggctgcttcacccatcctgcactcctgctcagcatggggtatggcacccaggaaggccttggtcagagttgctcattgagggcatgaaggacatggagaaatacatcgggcaaggagaggagtccagacatgcagctgtggccagcgatcccagagggtctctgcatgcctccagggggccttgagaaaacaggggcagaggaagtgccttgttggggccccacagctggagcccttggtagagaagcatcagcctggctggagcaggccagctggacatccccagcctggacatccctaatcactggatgagcaactgggtgtgagggaagcccctgcttctcacatgggctaatgatgccttattgaagatgaaagtaactcacactagaaagctctcatcctgaccagagggccgctaactggccattcaaccctcctcagagtaagtgctctggtcggctggcaggctgcgtaattacctttacctccggcagccacgtatgcagaggagggctctcgcttagcccgctcctcagccctgcgtgcctgctggcctacagccacatccctcgtgatgcagcagaacctggcttcagcagcccaagaccagcagccccacccggcccaactcctgccacctcacctggaggtcagctttgctggctgtgcaaatctgcataccttctaaataatttataggcatagaatatgggtttgtatttccatgctgggccctggcaggctggcaaggcaggcctctggagcaaaaccgtcagccacaaatacccaagctccccactgcaggtgaggacaaatgcggaaggaagaccaccgtgggaaggccagcaggtccgccctgaagctaccgtaggctgaggctctctgaaagcagggtgagctcctgggcagggagggacaggcccggtctcatctcccatctgtacacttggcgtggagtggcatggaagaggcaggccaccaacctgagcctttcagaggaacctgaccagggcagggagagcagcacagggaaagggtgaggaattgaggttgggaagcataagaggaggagaaccatgaaagatgaggtggtgttaggtcagcaaacgcacacagagctcactcttggggaagcactgggcagagactcagctgtgagcaagaccacagcaggccctgcccatggggagcttgccacctgggtagagaggcagcgggtagagaggcagaaagatgacccaataaacaaagtaggagctgagagagagcgtcctgggtgcaggaggaccaactgtcccaagaggtcaggaagggacatcggagtggatacctgaacgccgagctagagataactaggcagagggtgaggaaaaaggtgtcccaggcaggtgaggggagcatgtgatcccaagggacaaggggcttgactgagggaggaggcaatacccagggtagaaaggccgccaccacagttagggccccggaggcagaactcagactcagaggccagggcttggagaaggccagcttagctcggctgtgagggggaccctccccagcctctccagagttgcccagtgagtggtgagtccccatcactgcaggtatgccagcctgcaagccgctggagaggggactgagtatcagctggagagctggacttggcctttgaaggcctccggtgatgactgttgggacagacatgcaaccagagctgttatttaagacctcctaggacctaaagctgttatctaagacctcctgatgttctggggtctggactctgtcctttttggctctcccttgctatataaagacagaaacacagctgagtgcatgcatctgcctccacctgcccctgctgtgcaggaaaagttgtcaggagccccttggcaagtgtctgatgagtgactcatctgcatgaggaacaggggtggcaggaatggggcccccatctgtgcactggggttctgggtggaacaatctctgtcccccattacaccacagagggctcaattctgaaccagaactgatgattgctggccagtgcaccctgcaccagttccttcttctcccacacttggaagtttcaaacccagactgcccctttcccatctcaatcgtttacttctaacagctgcatggtgggaccgggcactttctagtcattgtctggagctgagtcttccagcactttccatttttaaagatcccagctggaagttgtcaatggcctccgtgcagagcaattgaatagcagaaaatgaactaattacaggttgttattgaaaatctattatatacaaattgcaaagaaaactcattaaaatatgaagctttggtgatttttttaaaccctcctcttggagggagaggcaggaacggggtggctggaaaccttgtccttcattattcctggggtaagaactcccccaggagctgcagaacagcctcatgttcatgtgtcacacagcccagcctgacatcataaagctcgaaattttgcatgcaggagagagctctctgaatgttagtaaatactcaaaaatggctgcagaggaaacaaagaatttcattacaaagatataaaatgagaacaatttaaatgtcagctttttaccaggatagcaccatattgtcctcataaatctccatgtttttgcaaagcttttgtgaggacttcaatgtgcaattaagcactgaaggtcacattcccgatttctcagcttgctcccttggattggaggtgttgacgggcttaggatgtgaatgcctgaggcttccagagctcacatctcaagggaaatctttgcatggccgaggctacctcccaggctccaggcaggagcccagaaaccaaactgagggtaacagggagtgcccccaagcccactgcctccttggcctgccagcactgcccttgtctcagcgtgagtgtgggtggtgtgagctctgaggtacctagtgataaccaggtgtactgaggtgtagagaagacccaccttggcatgcttctgaaaggtaaaccttgcctgaggttgtaccagcctaggaaggatgcttagggcacaatcaccagttctctagcttgttgctctttccttcctctctggtcacctgttctcaggctccatgacagtgccctgcagaaccccaccaccactactacaaggcccagcttgtgggctgcacgggaacaagctgtgtcctggggttagggagtggtggggatgtaagaggaactccactcacacgggacatagtgactgactgggtgaagagctgtgggccacactcagggccagggcactcagaagccttggcaccaaagtggcccctgataggagctggctggagagccagaccctggggacagacagtccctggctaggcagagagaggcattggacacctgagctactactgcctgcctgaagcagcagatgaggagtgagctggaaacccccagaagataagccagtgccccatctgagattttctcagcatcagcaatactgatccctgcttatcgtggcccttcctgagcagctctttagccccaaaggctaaggagcacctcttctagcccagaggccagccattccccacaccctcactctgggttgaggaccaaggcaggctgagagcaggagagtcgccaggtggttgaaatatagtcagaggccacaggactaatgagtgtatgcaaagacggcagcagggctatacagtaacaaacgcaggaggcacaaaaggacaaagggaaagtaggggtgacctcgaagagctggcagggtggttatggcccaaggctcttgttccagcgggaggacaagaccagcagagcagggaagaggagcctagcactttccatgtggtgggcattcagcctggcacagagtaggtgcttgacaaacatttgtcaccaggattaaagaccatggtggactttttaaaagttgtagtaaagagaaaatgttcagagctgttgtggcagttcccagagagaatgaagaacagacctgagggttccccttgatggtggaatcatcctgttgcccacgtgtggcatgcgccgggtgagcagctcaccatggttccacacagtggtctgtgagctgatggctgaggggcagagaggggacatggaacctgcagtcacccctcggtttggcaccatgctcccgtttactcactgctgtcctggtgggactcctgtttcccccaaagctggccttccacgggacagtgccaagccaccctagcaccctttataacagagcatctgtccttaccaaatgcctcccagaggctccctggataccataaggaggcccgaggtaagaggtagagtgggattaaaatgtgccctgcagtaaagtgtttgtacccaagtcttatctgatttccctttttcgaagacctgtgaagtcagaggatggcagaggctgtggaagttgatctttctgggtatttatttgtgttcttgataagcaggaagagaaaggtcatcacaagtgcagcctggaaataaaccaatgggagatcttccccgtggatggaggagcagatgttctgagtctatgtagaagggggcacacgtaacggccatatgttcagagccccgagttctcatttagctcacacaggatttggtggggttctggaggtcccaggtttttgcctttacatatgaaggctgatagcatctttggacccttgggatcctgattttgactgggacaagcgaacgctcgtaactagtttgtggaactataggctggactcagcacaggtacaagcagaagagttttgttctcctctgctcagacttcccggtgaatccaaatcttcccctggctgtgggctgaggagggtgatgagctgaggaccgctcagcagtttggtcgccaacacgaggtggctttctgtcactatttagcttgggggtacttggtaatggctttccattttgggcttccactagaattccaacactgcagcaacagtcccatcccgtgccccactccccatctagatcttctcagggaaggtgcaaggaggcctctgtgcgagccgcctggggcagcctgcaagctatgcccttggagagccgttcttctccagatggcatgggcaatttttcgtcagacggtgcttcaggcagaacaactgtttatatacttgttgggactgcaaaacgcatccaggtggggtgggaatgggccccaaaggactctctccccctccacaggtggtgcgatgggcagtgtatggagcggcacttccaagcccaccccacattctccatctgggtggcgtctctgggcttactcatcttccttatccccttcagacagagcctccactagcgagttgctgatgactctccagagcctgttgcttcccagcaaacactgcaggctgcgtgctcaccacgtgccagatgccatgagaggcatctggcaggcagaacctctcctgacctccgagttccaaaaataaggaaaccaaggcccaaagaggttggggctgcagagcccaactcacagcgaggtgtggcagttctagacctgcgcactttggcaggatgctggctgcacttctgctccagccacgactctttggagtctttgtgtcttcccccatgatgtgtgactctggggtgggcagagggtgggctcagtgagacagaccctctctgggagctgttcacctgtgctgcggcagatggcagggcccctgaagtggcatcctttctgagtcctgaagtccgtgtgccacaggtgttttcagacacatttcacctgggtccctttcagatgacagtgtgaaaggagcaggattactgtcctgcagaaccatagcagttgacgcctccaacctcctgacaaagctcagggcttccggctccacagagaaagcggggcccgagcagcagagctgttattcagaacaggtgtcccgtggagggctgctttctctcaaacccaaaccccatcaaatatccactccttctcagctcccacaaataaatgcacctccagagactcctcttctgagccacttccagccctggtgttggtcctgaccctcaatagtctacctctgtgccatggtgcttggaaatgtgctgatgcttggcagcaggttcaacatcagggaaacgatggcttggaaacagaagtcacatccctgcctttcatgggtgttcgaaacacccatccctcggtaaattgctgacaccttggtgaaggctgacagccttcggaggagctcgcaggaagccccaggctgaatactgtccaggccaactgtaccaggccacagctggggaggccactgctccatgctcagggcacagtaggggatttaagggcagtggagtcgactcctggttggctcagacagaacaaacagggttgggtggggaacggggcctaaaagtactacaggttaaataactcagcatctagaaagctctagaacaaagctagcccagggccctgccacccctgacacctggaggtgctgagtgaaagagcagacttggtaacaagcagactgtgtccctgtgggagatgtggccaccatgtctccttcctcatgtcccctagtgcagagggagcagagtaggtgcaaggtacagctggatccggccatcctgcatcccgggcctccaccaacacccttgaggcttgagggcttagggcacttacagaatgcctgtcctgtgaatggtggccaagcgatggacagagcttcctggtaaagctaagggcttctgagtttgggaaaacacagaaaatatggaatgttccgtggcagaagggccagctgtgaggaaggtggggctttggaaaaggagcaatagtggccacaccttaaaggcagccctggaggcaacccagtgtgtctcaggctaaatgcagatgtctgccctgtagacagtgtaccgactaattgtattccatgcagttcaaagttctgctcatttttcctgggtctcaccctccccagccccccaatcacagagcacctatctccccttgccttcaactaaagatgtgcacacaccttcccagacacaaggaggagcggtgatggggcagcctttcagggagctctggcttctgctggttggagaagcagttggtagctgcttctaattggaaaggaatgccagtgggcttcccctctggatgcttccctcgaattctctaaattaacaataaaggcctgggctgagcagggcccccagacccagagtcagctctccatcattcagaggctgactgtccactttggaaaattcatgccagactctccacagcctccctgcctcccacctgccagccgccgcctggttagaatttgaaggcagcccatgtgaaggggaagcagagacagcacagggtgggggaaactcaaagcaactggatgtgctgctggttaagggctctgggaagtagtggtttttgagaggagggaggaactcagcattaaatggacataaggagagagactggggacatctggccatgtaggcccttcctgagccttcacactcatgtgtgcacctccctttgaagtcaggagaggtaattgatcttgccggactcagcccaagcctatgatccctgcccttgagaccacaggccccagcccctctgtaagcagccctggccaggcagctgagcagatgaaatattcccaggccccagagtgagcagtgtgactttaaaaagtctgtgttagactagactgactgcacccaacctgttccttttgaaaacagtgtctcagaaggctcaggcccttacaagctctgtaacctcaaatgtctaccaagatgcccaggctgcagggagtagccctcatcccaggggagaagtgcggtccttacaatggcacaaccacaaaggctctggccggggcctcagtctcaccaaagggactggcctcctggtctccagccccggttcctgatcctcagatgaagatgttctgatgccatgggcacttccagggagaatggcctggcaagtggctgtccctcagttctctgcagagggcagtaagcttccagagcgaactgagacacccccgcaggtgccacatgaatcagcaccatggctgagtttcctgctctcagatgtgacagacatggtctttgaagtcacaaagccaacaggttaggaagcttttgggcttcagctctgagtaggcaggagtttaaggaaacgccccaaattgaagcaacacaacaggtgaatatttgctcttatgtatccattcatgcctaccatctgccccaggcaagttctggactgagccctgggaaaagaatggtgatgtgacaagcctggccctgtcatcctgtctgcaagttgattactaagaaactagtccagggcccacagtggggaagcccacccacgatggagtgttggctggatgggcagacacttgcccagcacctggtgtacaggtatcacacacctaaggagcagagcattgcagggctcaccatgtgttgcagagcttgcctctgaagccacataattaatttcaggtaatcatacagcattcatagttgatgctaagctgttctaagtgaattcattaatccttgcagcaatctatgagagaggaactatcgttatcccctttttatagatgaggcccagaggcaccatgctagagtaacttgcccacctctcagctagagagttacagggcagggtttgaacccaggagttcagcttccaagcctgtgttcttacctactaagctatgctgcctctcaagtcattctagacaatcttggtcaccagcgtctgtttcgggagaccccttgggtgcctcaaacttggcaggtaccagtggctagggatagaggactgctggtccagatgagggatgggggactgttggtcccgacgctgcacaccccacctggcatcctgtcccacaagggccagcccatcagaaacaccctggcttctagaatctgtgctacccagcagagtccaggagggactacagtgaggcctcaggggtcctaaacccaatttggcaagcacttcttgagacttcatatgcccactctagatttctgtgagagctggggccagtcaggtgcacaggattctcatgaaggaggcagggagcaggaggctgtggctggtggctgtgctgtgacatttgttattactaataacattgactgagtgttaagcagcttaacattatctcatttagtgacattcaatccttatgaaaagataccacgtgtctcattttagaggtgaagagccggagacacagagagattaagtcattgcctgcggttacccagtagaccaaaaattccaacccatgcatgatggctccagcactccatcagcacatctgatgaggccacctgccacccacgagtcccaccgagccttggcttgaggacaggtgggagcaccctcctctgcccctggaaccctggggctcacacattccatctttgtgcctgatttaatcatgaaaaccaagtgttctcttcttattcaggaggttgattcttcctctgtctggcagggatgttgtaataaccaattaatacgcatttgcaaaatgctttgagatcctgcacgtaggataccatttgtgcaaaatcagtttttttggtaacactatttgacatgaaaaattgtccttttttctcctgtagagagctttttttcaaaatgccttccatcaaagggtgcaattatgaactctggaagacttcctgataccatcaaggtaggcaggtactccctgcccatgtgaccttagaggtgccccctcagaacctacacctgaggctgcagtgtgcccaccagccccagcccccaaggcaggcctgcaggtgaaaagtgcttagccctggaggcagtgtgcggtcattcacacaaatacttcctggcaggagctgttctaggctgcagaaattcaacaggtttcaacacagacaaaaactcttgccctcacggaacttgtattacagggaggagacacagataaacaacaatggatgcgtagattacaacgtgggtagtacttttgagaacagcaacacagagggcagggtagggcagggcagggcaggggtgggcaaaattaaatacgatagcccagggaaagcctcatccagaggggctatgtgagccaggtgttgaaggggtgagggcactcgccacgcagtcactgggggaagatgtgtcctagccccctaggtaaaaataggtctgatggtaggagtggtatgggaagctgggggcagggtcaaaggtcctgggggcccctggaagctaacctaagcacttttgttttcacaatgggtgaaactagattattggagggcttcaagtcgagaagggatgtgatctgactttatattttaaaggaagcactttggctgctgttttgagaaaagactgttacagggcaaaagtaggagcatgtagacaagttaggaggctgttgcaataattcagctaatgggcacgatggtggtgaggagaggctggatcatgggtatattctgaagggcggtgccaaagagatttgctgatgagttgcatgtggttattagaaaagaaaggagtccaggataactccagggttttgggcatgaggactggaaggatggagttgccattaactgagacagaggagaccatgggtggaggaggtttgggagggaagatcaggagttaatttgggggcatactgagtttgagatgctatcagacattcaagtggcagtgttgaacaggcagttggatagacgaggagagggctaggctgaagatggaaacttggaaacccttagcatactgacagcatttaaagctctgagttggatgagatcactgagtaggtgaatgtggatagagaagagaagccaagacagagccctaagagcctctgatgggaagaggtcaggaagaggagtgggagccccaaaagagaatgagaggaagatgccagagtggtgggaggaaacccaggcaagtgcaatgtcctaggagccaagagaagagtgagtcaggaagcggtcagctgtcccaagtgctgaaagctcagttaagatgaggacaaagaaaagagacttgtattagtcatttggaggtcttcggcttgaaaggcagtttccacgcagtgggatgggagagggtacaaaagtctcattggattgggtttaagatggagtgggaagaaaggaactggagaaactaaatgaagataaatcttctgaggagttttgcagcaaagaacagaatagggcagtagctaaaaggatagcagggccaagaaggcttttgcaaacacacgtgagcaaccggcatgtctgtggatgagcagagtcaagtagaaaggggaaactgaggctgtggaaggaagaggcagtacaaccagatgacttctttgagtaggcgaggggaggtggaatccagggcccaggttggggattgtcttagatggatgggcggcagacccagttaacaggaaagaagcctgagagtgtgaaccgacagagatgggtgggtcggtgtggtgggtgcgtgtgcagacgtctgttttctcagtgaatcaggaagcaaggtcatggctgagcgtgaggataagggaagagatgtggaagtctgaggagggagaagaaggtcgggaacgattgtgtaggagagtgaaagagggacagatgcagaggaggcggagtgatctttgggcagctttcgggacccacttgagggccctagtcctgaatccaaagtgagactagtcagcagggtggccgtttccccagcatgttcagctacccgggtataagcagacagcacccagacagatttcaccagggctggagggttgtcaagagagggtaagggaattgagtgtgtgcaacagtatcattccagtgatttaaattccatggaattccatggtaaggaggaagcaacatcaccacaggtgacaggcatacagttggtcagtagattcccggtggggctgaagaattcttggagtctggataccagacagaataaaccagaagagatgggaggtgatcagagagtaggatgcctgtagatatgagttttcaggctgctataatttgtaatgacagtgtctggactccaggatatggccacctgtaaggtggagagttggcaggtaatcaacttggatgtttaaatcacctggcacttacacaggtggcatataagggagactgctgttagccataggctacaacacaggaaatggggtggggcataacccagagtcagcaggtgactgcagcaaagaggggcggtgggtggcacgtggagcatgcacgggggtttccctttctccctgagagcaggttctctgaggcagggtctctttttatgcccattttacagaagaggaacggaggcatcaaaaagttgcacgtggtggtagagatgaaactcaaatcaggggatgtcctccaaaattaacaccctggacaccacacagagtaccttccaacacagacaggttgaccatgagtaagatttggtccctggccccagggagtccactcttctatgggaaaacaagacgtgtgcaaaaacaaggcaaaaggctgtgggacggttgccaaaagaacgccatggaaactgagaggagggtgtaacacagctaagcaaaataatgctattagtcttcacaaaggagggcacgatgggatttcacaggcaggtatgggagtgggaaaaggcatcccagtcagaggcaacagcctaagcgtaagaacagatgggaaggctccagaccatctaatatggccaactcgtcccgtgccatggacaaataaaagagaagaaatgatgcaggagggagggattagaacgataacagcaagggcgtgtgttagggagctaaatgcaatcacacacaacccccaaatctcaggggcttagtgcaatatttattagtgcaaagatttgttctccattcctgtaacagctcaaggctggtgttcagtttctgtgcacacagtgacatggggactcggacaccttcaggatgtggttcttccgtctcctggggcctcagattcctttactggatgctgcatctggccggtatacagtaggatggagagagtagagaggcttgcaggagctgttttggagcccagcaaagcccttgcacccatccctcctgacacattccactggccagaactcagtcatatggatgcctcaactacaggaagagctgggaaatgtagtccagctgtgtccacaggagggaatggatgcaggttgaggtgaacacagagcattctctgccaaagacatgcaggccacagagtttgggcatgtcaaggaagccagggaagcatggagggtgtggtcaaagtcagtttgaggaggaccgacctgtagacacccacagggaagagtgaggactaggaaactccagagactgtagaagacctgaacacagatgcaaaagtgggaacagaaaagggcacaaaaagaaagatgattctgggaggctcttgtggcccttgcgtggggtggcggttgggagagaaggagctgaacagtgaagaccattccgagagttcgccacagggccaagatggccgcctgcctctccttcttagctctgggggtgccggaaggcagggtcaggccctgtggagatggagtggcgggaggtggctgtgacggtcctccgcagtccatagcctggccccacagaggggagaagaaaggatctcttttaattttcttctcaggcctccacctgacgaaggagaaatatcacccaacattgttatctctcagaaaatactctctggaatcataaaaagggaaatacagtgaagctagaccacgaaggctgccccttaaatcaggagcttctaaattatcacagtggcgctctctaattcctcggaatgaaaacattaaagatgacaatgtccctttaaatcaaatgccctgggagttgctgtaaagagtcagtgggcttttttttttcccttgtgaggatttttttttttgtctcttttcaccttataataaaatataaatcataacttgtgggggcaggctctacagagcaagctgtgaacatggattttctgaaaatgaaggttttttttaatgggaatcatctcatctcaggaagcatgagagtctcaaatgatgagtttgctacttcacactttctttttttttttttgattcacaggtgggcctcaggcctagctgtggcaccactgtgatgaatcatgatggcacaccccaggaggccagtgggctgactcaacccctcctggagcggccactgtgctcaagctgtgcgaggtaggggcagggaggcacagccttgggaggtagcatgtagaggcaggaggactggggcctggaggaaagggcatggttcacaccccttggccccttccaggcaggcctggtggtctgagctcttgtgccacaaagagaacccagaggctagtgcagccccaggaggaagggttgggagccacgggtcagagaaggctgcatggcaaggtggacttgttttctgcattctggtgtggaaaaggggtcagagatggagaaagaactggcgagttgacccaggctcgggaagtaccagggcagcacgaccccaagggtctgcccttggtctgccactcccctctctctgcgatcctccatctgccagtgcccatctccatgggctgggtggagactcaaggcctggcagggccaagtctgggaagctgctggacagttgtaaccaaggtaggaaagcagtctctgatattttagaaaagtgttcaaggcttaggtctgaaatcgcagggcttgctgattaaaacatgtaccctatggcccacagccctctcccctcccactgaactagccaagcatcttcagaaaggctggctcttctcatcaactccatggccttcatcctgacccctggcttccctctgtgctccgtccacaccctccccacctcccctacacctgtacaggaactgaggcctgcaacaggtcactcttgccctgcggttggcttaggcagagaacactcctatctttatccagtctgacctctctgcagatcaggccctccggacctctccctccttgagacgctcatttgctctccacctttttggccacctgttctccatcttatttgaaagtgagctcctttcccctgccagccccttacactttcttggtagagagccaggatgtaggcatcttaggccttgtaagccatacagtgtctaccacagccactgaactctgacattgcaacgtgaggcagctgtagataaaatgtaaacaaatgaatgtgtctgtgttccagtaaaacctgatttacaaaaacagatggagggcctgtctgagacactcaggtgcgctgctcccctcaatttactctgccctggggagggtcttgtcccacccacgcctccagacatgaggtttccagcaccaggtcttcagaagtccctaaggtccaaggggaccaagaggtccaagggtcattacttagaggcaccacacacttagtgtgactcaacggcccgctcttcccccaaactcccctcccctcctgtgtctcctgtctcaccaacatactttcccccttcccattgtacttcttttgtaatcggattgttaagtgcttccaagtgggcggttgagtctttgagagctgcacgtgaccttgagcgcaggctcaggagatgggtggggagtcggagacggaggctctagggagactgaggggctgggagatgcggcacaagagtgggaagcccagcactgcggactcactgggctcgatctcctccctgacgggctggccagcattcagctgtattgtcatttcagtggggtcccacagggggtcatgttgaaaagaagcagcccacattgcaggcgagggaccgcgggccaaaggcaggtggcctggagccatgggcccctgtctgccggcctgtccatccccaagtgtgctgaggtcactgagctgagggcagtgcttagagccatccaagagggctccaggggcggggactgtgttggaggccacatgccaccctctgctgtggttcctgctttacctcatcctaggagaccacacagcctaggcataatgcctagagctaaaattcaggggcttcagatagccatgtcataatccacagacccagtggaaagtacaactccctggggccccagtcgcccgtgtgggacccctccccaaggctgctggcctgctgggaagcagggatgccagatgaagagggaagacccaggctggaagctttgccttatctccatgccacagaggctcaaggactccccgatggccctcacaggagctctgcccccagctccattttcctcattcgcccagtgctggcggcagagggcatcagcagaggtgcaggcattgcgagtgccctctgatgcagctccaaacattctgttcacttagagcagcaaacagtctcacctgtctcctgctcatcatgggtacataaaattccctgttgtttattcactctcctcctcacagtcctggatggcaagacacagtaattaatcatcaggctgcttttgcgaggggccacaccctgctggtgctgcacctgggcagctgcctaacagattggctgccgaaggtttgttctgaggctgaattcttgatcttggccactctctcggggatggagagccatcagcacccactttgcacgcaggcctcactcccggcacactctcagaaaggccctggaatttattttgcccatttgaatacaaatgcaattgagacaagattctttttgtttcagaagtcattgcttcatttctgtttctcgtcaagtgaactgacagccaaagagagttgaaataaacaactctgtgcctggctgagccagatgaaataagtccccccacccatcactgagacatggtaccatcaggttgtgttaccagttaagggcttggtgctggtctttgggcagctctggaggcagaatgtcaggctttgggctacatctgtgccaggacaggctgcaggactagtcccagagttgggcaagctggaagacaggtgcctaccacagcaggacacctgcccctctgccctgtgtcttagaggccttttccttcagcatggatcctggggaagggagacacatgcagtcattcattcaggaaggggagaaagtggcagccaaggccccactctcaggagctcctgacccatctagggaagtggggctcccaggcaagaaggaggtatgtaaatatcaagtgttaaaccacagggttgggatgataggtgctgtggaaccatctgggcttcctggaagaagatgggcttaggctggatcttgaagaatgaaggtgggatagatttggacagatagagaaggaaagggctctacttcaaggcaagagaaaggctcagaagaaggattaggagtggggattcaagaatataattccttcagtattaagtacctgctaaaggtgggcagatcaatagcggggcagttggggttgtgacctcattttcagctctgccctgctttgccctgaggctccagacctcgcagcccccaaggttcccactgttatcccagttcccaagggcagctgggatctgaccttgctcctgagaaatgctgcatgaaagaggggcatacactctgtggagctcccttgcccaagggcctcctccaggccaggctgtgcctctgagcccaggctgcagagacgggaggatggcacagcaccacctctagggtatggagagcagcctctgacagaccctcacctcagtctttgtagaaagagagcagacagttttcctgtaaccgaggaataattctcaaggtggacatgcgacccagaaaaatggagtgatgcttagtccccagatgccccctccagcgctgtccagctgtcctgacaggggctgccactcggataggtcagtcaagcgaggccagagcccttttcacaggcaccttggggccttgggtctaccttcactttccaggacacaaaggctctccctaggcaggctctgtcccagcatccagggccaaggggctcaggcagaggctctttaaaagcttggtgcttcatcttgatgagtttcttgctgggggctctgagcattgtgactgtgacaggttttgagcccctcgtggctgggcagggtctgtgtttggtcttgtgggtactgaatatgaagctgtttccagatgaacagcaacatcgctccaaacagttcaattcagtgagcgggccaggagtggggcctgggcagacccagacaggcctgggaggggcaggcagcagcctctccctggctgtgctgctgagggtgcctggggctccctgtcccaccatgggggacccccgggacagaggggcctctactacagggcccctgcagcctgtctccaaaactctcatctaaggcctgcagagtccgcaaagccccaccctcagaaaggttaagtcactcactcccagggctacctagttagtaagaggtggggctggaatactcaaaatacattaatcattttttaaaataataattgttctttactgaggcattactttgtgccaggcactacgttaaatcatttatattatatgtagttcagtcctcaaacaggtactattagtaaccccagtttacagatgagatgactgaggttgggcaatagcacagctgggattaaatccaggcaagtccaagtccaaaacaaacagcctttctctgctttcctgaggcaggagattggggataaggcatgagggagagatgcagagtgcttgtgatgtggcagtcatggaaggcaggctccctggaggaggtggtgtttggcatttgaatggcatccagaaggatgtgtgtgattggagtaaagggcaggaagaacagtgggagcaaagaaagacactgaggctggaggacacagaatacattcaagaaacggcactgttgtcatcctagagcagagtgcgggcagcagggggcagtggggaccacagtgtcaggtcagtcagactatagaggcctggaatgagaggccaagaacagccatccaaagctctgggcaggggagaagcagatccagggctgagctggttgggatgcctatgcctgcatcttaggaaatgaaatgacccaactgcggcctccatcataggccagcacccaggtagcatcccgagccactgctgatttaagagatgtgcatgcagctgtcattcacagactcccagcaatagtgttcacctcctcggtagaatagtcacctacaaagcatttttttttttttttttgagatggagtctcgctctgtcacccaggctggagtgcagtggtgcgatctcagctcactgcaagccccacctcctgggttcatgccattctcctgcctcagcctcccgagtagctgggactacaggcgcccgccaccacacctggctaattttttgtatttttagtagagacggagtttcaccatgttagccaggatggtctcgatctcctgaccttgtgatccacccgcctcagcctcccaaagtgctggaattacaggcgtgagccaccgcgtccggccaacctacaaagctttaacacactgaaagcagaggatttctgcctgaaaagcactggtatttggacttgtgaacataaagatgggaatgcaaccaggcaatgcaggggctgcctagagtcaagggtttgtttttaagtaagagagacagaatgatatttacaatcagtacttctcaaattaggttttctttttatgggattgaaaattctccattcaagccccatggagagatgtggtctgagggcagcattgaggcgatcagtgtgtcttaaaacttccagacgctcacagacacttaaagtaaaaacagagagaaacaaaattgtttccaaaaagcagcaaagaaggctgatctgcttgttaggatccttgcagtccactgtgggccagctcagatgccacctcctccaggaagccctccctaagtcccctgcctgcagtcctaccttgcttcagatgcatagtggagggtccccaatgtgatgatgtggcctccagctggggcaacatccatgggctccagagagccacaggggtcatgagttgattttttaagccttttgaaccatagcctatgggtgagaagaaaggtttttgtcaagattgaagaggcgattaacttgtagcgggtggatgtacatcaaaaacgtgctccacagaaacaagatctcttcagaaaaagttaggtctcattgcaagtgtttttacatgcctgaatgtggagatctgggtagggcctccaaagctctaaggtccgttgtccctctctgttagtacctagcaagtgttaaccgtgtgcctgatacatgctaaatacttttcacatattcagtcctcactaaaagtctatgaggcagattctgagtcccattttaaagaagaggaaactgaggtccagagaggttaagaaatttgcccaaggttgcatagtcagtaaatggtggagttgggattagaacccaggctcctaagcactgcacaacatcacacccagggatgcttagaggtcagccttgtgtcgtgaccatgtcacacacacacctaggttgcaagtgccatggacacagggcaggtcagattctgctgtgctcaggcacccaggacagggcttggcacagagcttagttattggtgccctggcaggtggggccaccgatccagctcccttcctaggacttcgtgctctgggcaagtggtcaaccctgagagtgctgacagcccagtggacaggtcttggcaaagtctatgcctgggcgtggcctagcctgcaggcccatcctgaggtttatggaaagtgaatcaccaaaccgggccaggtggtgctgagctgggtgcagctggggcagcgaaggagccattggacctcatagtctgagtgatcctcagagactgactcgccagggagttttgtgtgactgactgactccacagctgggagctttgtgtgacttcctcacagaggaagatcacgtgagatgagtgagggaggctccttgtggtggcaggacatgcccttggccttggaggaaacagggaaatcattcctttggaactgttaagaggaaaatgtgagaattcagatcctactccatggcagttctgagggtaatattttagggccaagggaatggggcacctttcctgcccaagtcagagagaacctttggtaccagaggcagccttcagggaaaggctagggtcccagccagctggcacctgactgaacctcacttgagctgtatgtgttcccctcattctgccaggacactggtcaaagctgaaatattattactattacaaggttttagcagtgccacctccatcaagatttccatttgtcttctcgcttctcttctcattgtttacaaatatttcttgacttctctctcttctttcaaacagtgccctgcccatttataatcagaagacaaataaactttgtgcaaatctccctgttccctcatgaactagccaggcatagaaggggcaacaccaagggtgtgcctattgactcaatgccatgttttgaccactctcagggccgcccagtggggcttccatagcatcacctatcatcttgtgcccacttactccagagccttcgctggctccctatttcccacctcaccaagtctgagcacctctgcctgctcgttaggtctcgtgccctagccagtcctttcacagcaccctgacaccctactcagcctgtctcttcccgtgggtctgtttactcccctaccctaccccaggacttcctccaagcaaaaagctaatatgttaaggaaggcaaggaccatgtcagatatcctccagcatctgacaccgagcatcctctccaacttgagacagtttataatcatttcaaagtagagaatgccaagaagactggcctgtgggggttcatccaaatcttggatgcctgaatcttctccaggagggttgcccaaggacttaagaaaaagagcgagtgtccaaggcagagtccaaggagtggttccagagcagcacatgccaggggctgtgtctgcacaggttgagtgggaagaggaagaggataatggcaaggatgtagagggaggagactgcccgggcaggcactgctcacatcagcagggcgtcagcagcaaaactactgctgccctctgcccactccttcccctccctccagtcccacttctgccctgaggggcatctgtcttaggatcaagaagaaatgtcacactccaacaattgaaggatagtgtttttaatgacttgactcactctaattagaggaagcaacactttgattagcagcagtctgacctgggagcatggacttgtgagaattgctccttatgatgtgcttggagttccaaatttgcagatggtctctctgaggttggggctggatcagcgtgagagaagggacagtgctgggcagccccctcccacatctgtggagataacatcttgccttctacatgtgtctcctggtctttgcctgatatggtttggttccatgtccccacccaaatctcatgttgaattgtaattctcaatgctgggggagggacctgatgggaggtgattggatcatgggatcaaatttcccccttgccactctcatgatagtgagtttccacaagatctgatgttttcaaagtgtgtagcacttccgcctttgctctttctctcctgctctgccatattaagacatgcttgcttcccctctgccttctgccatgattgtaagtttcctgaggcctcccagccatgcttcctgtacagcctgaggaactgtgaatcaactaaatctctgttcttcatcaataacccagtctcaggtagttttttatagcagtgtgagaacagaccaatatattgccctacacccatgcagtgctgtgagccaacagcccactgtccaattcctcataatggtttctatgagccactgcccctggcaaatgcaccttatggccaaacatctccagggcctgctctcaattctaccccaagcagcactagaatttccttacccctggggatctgctgccccaggtctgtataggaaggaatgccaccatgtgtctggcattatttgggatgaacaagaaggtgagagagagaagtggaaagcagactgtccccctggatctggaccatgtaatagactcctcaccagctgtgtctcttgtattgctttctttgtcacttgccaatggacacatctttccaagacagggcccaggtcactgtccaccatttggacaagggccagccccaccagatggagtctcaaggcacggcatggccccgttagagccttggagaacactgccacacacacacacacagacacacacacacacacacacacacgctaggcttaaaggcccagaggaccccaggaagcgcagcacacctttaggatgcaaacggttcaggacacccagtttctccaccaccactcttgaaaatctctgtcaccaatgagcagctctcagaggtgagcagcaggtttcccttgtgcctggtgagaaaacaatggcatgtttactttggtggggtacatctcctccagcccagggccccaaccttgtgctaacagacattccatgcccctctgctcccaaatcatttctcagaacttaacaagtgttaatggctatctctttggaaagagacaagtgtcagatgagcattgcaagactgtagtatttgtttagagaaagttgtcttcctgggaaaggggcttctgctctttgtggtaacaaggtcagtacagaccctttcagagcggtagttcagggcctcagacaactagggcaagggtgacaaacccctggttcaatggggctgagcccaggtgagggttcagggcagttcccattgaccagatggagtcagcaggcttcactcactggtgaagcaactcaggtctctgttcagggtacaccagagcagtcccagcccccagggcacgaagaggggatggctgtcattcccagaacggaagacctctgctcccacccacaggagccactgctgcacctccagctcacccccaagaagaatcgtatgggagaaatgatcctgctgctaatgggattaaaatgcattttgagttttccaattacatatttcaattattccgtgaatgttaattggaactcaacaatgcaactgtgagctggccagaaaccagaactggtggcttctcccccaaatggccacagatttcctaccctggaacatgcaaggatctaccaggaagactcctctggggccccagtgtttcaggaatttctaccactgcctgagcatgtggtttggtgctcctggccgtgttcatgtgtgcccacagaagggcacatactgtttcctctgcttggaagcccctcctcaggccctaccttcccatcttctgggcaaactcctttaagactcagttcaagtgtcccctgctcagagaggccttaaggacaccacagatgcccaccaagcatttcccatgtctcttctcatctgcctcccctggactcactcatccgccattcccaagagcttacatggggcttggcacatcatgagtgctctatgaattcatgcttcggggaaaacataggtgctcagattcctgaccagttccacccacctgataggccaggctctggcctggtctctagtctgggagcctagaaccttggatttcagacccaggtttgtcaacaactcatctagtgaaatttcagccaccacactccccagaagtcctgacccaaaccccatgacctgctcctttgagacccaacccatgccctggaaaagccaaatcctccaaaatctatatcccctcttcatgtcctgggggctgggactgccctagtccagaacagggggccttgccagtgcagaccctcaactggtagctcaggagaaaagaaaacccctccctggccactccccttccgtctgcttgtccatcacagccttccacttttattctctggttccagctattcagcccaaatcatagaagagtcctggcccaggactgcagcagcttttagggagctcagcttgggaatcctgcagagctgggcagatttacctctctgagtctcagttttctcatctgtacaatggaagtaattgtacagaaacattgttctgagggttcaaggagaaaatgtgtgtaaagggcttagcagagtgcgaggcagggtgctcagggaatgtcagattttattactgttattatctgcctcctaagtcccacctatttcagagatattttcctaggaaaagggtttcaggcaacagtcagcagggaccttctgaggtctctggactcaagaccttgaagtgtccctcaaggccattaatgcagatcacaaataccaggcccaggatttgagctaaaggagagaaccagctggctcagggctccaaggaggttgggctggtggaaggggcaggacaaaagcaactccagggggtgtcccagacacagggaccggtgtgcaggctcactgctcacccaccaactgtttacccagcacgttccatgtgtggggcactgggcaggctgctggcatttaatggtaagcaaagccagatgtggttcctgcccttggagaacttacagttctagggagaaagataggaaaacagcggcagtctactctagatagggtagttatgggtagggcacctgtctgagggataatgtaaaggaagagacagggaggtgagaggaactagccagatgtccaggagacctggagacagggaggcgcttgctgtaatcaagggctggaggcaggccagcgtggctggaatgtggagggccagggaagctgtaggggaggccatcacagaaggagggtggtctttactctgtgttcagtggctaccctgtggctctgagtgggccttggttttggaggatgtgtgttcccaggctctttgctaagccctggcaaaacaccaggagcaagaccaggcagctgaggggagcctcccagttgtggtcagtatcttggagacctgctttggggctggggacttggtgctgccacattttgagagcagttttcagagcagcttggggatgacttttatgcctcatctgcacacccctggcccagtccatgtcccaaatggcatcagtcttgactgggaataactcaactcacaaatatttatgcctgggctctgaggtggcgagctctgtgctaactgcagagggtctgagtgggccaactgagcctgcaacctgccatttcaaggtctctcccctcaccccctccccatacccacctgccacttgccacctaaatcctgtccatgtaatgaggctggggttggcaatgaaatgattggccaggggtcagagcaggtggccacattgaggcctagagggtactagaggttgatttgctccctgagtgcaataaggaccttccatgggtttcctagggctgatatgagagatgatcacatggtggctttaaaccacgtaaacgtgtgctctcaccactcaggagaccagaagccagaaatcaaggtgctggcaggatcacactcccttcaaagtctccaggcccttgcctcttccacttctggtggctcctggtattccttggcttgcagcaatgtaactccagtgtctgcctccatcttcacagggcctccttctttgtcccccatgtcttctcctcgtctcataaggacaccagtaagcggattcaagcccacagtaaatccaggatgatttcatctcaagatccttaagtaattatatgtgcaaagatcctattttccaatcaggtcacattctgaggttctaatagacatgaatttggtgaggggttggggacactactcaacccaccataggccccaaggaggatgcccctgccacatgaccctgcctcatgccctgacgtgggtctcataggcctaccagccctgtggcccctccaccccacctgaccactccgatcctgtggcttccaccctccccgtgctcacattccccttggaccatcctaggagatgtgtgcacgtggccaacccagactcagcctgcatctccttgccaggctcctgggccccacctgttggcaacagtctaaggcagcattcctaaacatttttggcaccagggactggtttcctggaagaccgtttttccacagactgggagtgggggagcagaacagagatggtttcggacaaaactgttcagcctcagatcatcaggcattagattctcataaggagcacattacctaaatcccccacatgcacagttcgctatagggtttgtgctcctttgagaatctaacgctgctgctgatctgacaggaggcagaactcagtgcccgccgctcacctcctgctgtgcagcccggctcctaacaggccatggaccatccacggcctagagattgggaacccctggtctagggcactaggagtacagagaacacacagtcagttctaaagaacttctctatagaaactgacattcttttgcacgaacccccagcttcacagcagcatttgagttgcaaccacacagtataagcctgctggccagggctggcaagttgctggggcctcccagtgcagggcgggcaaaacacatgtgcagctacatcttcagctactcaggcccaggaaggctgttactaccctgtatacctgaggctaccttgccatctgggctttagttgattcgtctgtgggaggagcaggggatcagattgtcttgaagggctcatgcctgcctaatatcttggtctggagcaagaaatgcccctgcatagctgtgaggaagcggctggcgttttctagatggcagtggcctgcagacctattggaaccctctctagggaggaacatgtccctctgagctcagctcctagggtccagtgctccactgaggtcttccttgcacctctcatgtccgccaagaggtttcctgatgccacctcacctggtatggccttctgggacaggcaggagaccaggtctgagctcccttagactgtgttgcagggaaaaagtcatcactaagacacacccaactcctgagagaacaggaagcatacgctggtatcagccctgacagaacgtgggaaagaaagttccagcacagacagagccctgctgggagctgggactcctgaaaatggaagggctctccatgtggctggaggacaagtaggatttgggaacacaagccaagactgcagccgaggtgtggcagagggcctggggagctgagagagttacacagggcttcacaagacccctttgctccaaacagacatgccacatggaaccccagagctctagggagacaggcctctggacaggatgcctagccctcctatagactggccgttcttgcagccagtcatgggacctctctgcttctgaatgtcactgtgtcagcccagcagccctttgtacaggccatgagaccagtcacctctgatgtgctgggggtgatcctgggggcacccatgcaaatcttttaaggttcctggggttagttttcccacctgtgaattaggctcaccctcctgctattgtggtgagggccgcatgttccaggccacgggactgagctcagaagagcacacggctctggtcacaagaatgggcagagggtgatgaaatcccttgtcgcgtggcgtctttgctatgaggcccccacctactccggactggctgttctttatcttttgcttcacatcagcaccaagtgtccctggcatgaacccccaaaaacagttcagaagagggcttcctcctacatcatgccggtgggggaagaaagcccagggccccaggatcccccagagtcagccccactcgtgaggctgctttatccagagcatcaggggccaccccaaggggcaagtcaggtctaggagggccccagccttcctgcaggctcctcccaggacttgcccaggggcagagagaaggaagctgatggggaatagcaatacattctttcctctgtaaagattctatttgctgtttagccctatgttttctatgataatatttcagttattttttagatagtaagtggagtgcagcatacatagaaaagtgcacagctcaatgaagcagacaagagcatgctgtgcaaccactgtccccataagaaatacagtgccgccagcacctcagacgccctccttcctgcctgcacccaatccccatacccgtcctcctacctgacacaattatcatcccacttttcttttcttttttttttttgagaccgagtcttgctctgttgcccagtctggagtgcaatggcacaatctcggctcactgcagcctctgcctctcaggttcaagcaattctgcctaagcctcccaagtagctgggattacaggggcacaccgccacacccagctaatttattttttcatttttagtagagacagggtttcaccatgttggccaggctgatttcaaactcccgacctcaggtgatccacccgccttggcctcccaaagtgctggaattacaggagtgagccaccgcgcccagcctattaccctgtctttctaatatcacagagtaattttgcctatgtttgaactttgtatcaacggactcatacagaatgatctctgtgtgcctggctgcttgcttcaaactatgtctgtgagatttgcctattgtcacttcatttatagcaggagtttgttccttttcattgatgataatattctgttgtaagaatatgccacctgggttgatgtaccagcttgtttccagtttgggaaaattataaataatggtcctatgaatgttcttgtgcaagcctttggtatgcatctctgtcagaaatctatctcttcgcatcaaattgctggtggagaatatgcacagagtaacaagatattgatgcctggttttaaacatgctcctgttataagagtagacacttaaccatggtggggagtggggagggatggcctttggccccaaggtacccattcagggccagcttgggacacagtcttgaggggtcattattatttcccccaccatggccttgagaccctgggtgttcctacagggccctccctgcctttgggtcagggacacttttcaagaatttgccataaggctaagggctccctgggccaagacaaaggaatgtagggcagcagccaggagggaggccagggcgggacagaccttccggggccctgccatccccagcctgtagacagccacctgctcagaggagccacctacgcgtgccctccctctccactggggtccagcatcacaggccccaagcaagccaggacagccctgctggcagccagctgaagacagggttgtgagcaccctctatggcttccaccctgggggacaagagatgtatttccctccttaaggaaggtgcagaccccacttagaggggaaacattgtgattgctctctgttgacttgagttatatttagtataatgttacttaaatatgtacaaacataaaaccaggtacacgttccttatgcagggagctctctcacagccataaagctaaaacaaatttataaatgaaataaaagcaaactgcaaaaccaataaacttcaaattaacaacattaatttaatgggacaaagtgttattgttttcctgaaactaaatcagcgctcacggctgactctggggcaggctgctgttgttctccagggttttctgctaccttgccgtgtgctgcatgatgactcagctctcccaccgcttctttctccattcagaccacttcgaaaccttcattcccacagtctccttagctctttaagccttgctttgctcatctgtaaaatggagagggtattcgtatgtattttgttacgagaattaaaccagttgatgcaatgcagccttctggcttgagacatgtgtagtcacacaggggtccacactcagaaggggcccatgcttgctttaatgctctgctgtcgacatcttgaaattcctttttttttttttttttaagacagagtttttctcttgttgcccaggctagagtgcagtggcacgatctcggcaccctggaaccaccaccttccgggttcaagcgattcttctgcctcagcctcccaagtagatgggactacaggcacccgccaccacgcctggctaatttctgtatttttaatacagacagggtttcaccatgttagtcaggctggtctcgaactcctgacctcagatgatctgcctgtctcggcctcccaaagtgctgggattataggcatgagccactgtgcctggccacattttgaacttcataacagagtttccctccgtcaccgaggctggagtacagtggtgcaatctcagctcattgcaacctccacttcatgggttcaagtgattctcctgcctcagcctcccgaatagctgtgattacaagcgtgcaccaccaagcccagctaacttttttgtatttttagtagagacagggtttcaccatgttggccaggctggtctcaaactcctaacctcaagtgatccacccgcctcggcctcccaaagtgctgggattacagacatgagccactgtgcccagcctaaattcttataattttttaaacaaagggaactgcatttttatattacacaaggccctgtaaattatgtagcaggtcctatgcataggacaaagtcaggtatacagttggcacccaataactgttagcagctattactggtaccttgtcctggttactaagtacagattctttgtgatgttttcctctgatgacagttttatcttcccattatttaataggggtggagaggccacctcatgtgtgtaattgtatttgactaattcttggagttgagtgtgtgctttggagcgaggactgctgtgttgacggaaggattagctttctgggtcacgtgggcggtctgagcacaccaccccaccaaagccctctcactcgggaccagcccctaggcttcagacctgtgtctcttaggctgacattccaatggggtcaggcagaatactgctgtcttcttgaaacctcttaaataggtggccagagtttaagtaagttaacaggttatgaagttgaagacacttgaatggatgagaagctcagacagagttgctaatttaattttccttttttattgctgttctcctaaaaaaaaaaaaaaaagcacagattgccctttttctgagaatgagatattaataagcacagcattttgcaaaagtagagaagggcattaagattttgcaaggtctctctatttgtccctcacttctcaaggctcttctgctggcccaaataggacacaggctgaggggattaactgcttaaagttcaggaaatgggaaccacctttggctgctgtcaccagactcaagtattaaataacatccctgcctgcccagaggacatctctgcaagcaactccatcagccccagccaccgccctggccatgttgagagtttgccaaagaaaaatgaacacttgggcctcaaagtgcaggcattaatatcctaagtgtctcatcatggaagactttgttccccaaggagagtaaatctttccttgtgggatgcagcaggctaaggaccaagctgactctctgagctcagtaatcaggctagtctcctgctggaggcacagaagggaactccgctgtgtgtcagcacctcctgcatgccctgactcatgcttgggggaaggacggtggagtgagaggcggatatggaccctccctgggcagagctccctgttatccctggagtgggttactccttccgctgcctgcaaacgtaggtttcccttcagctacgcaaaggcctgtgaacacagatacgtggtcacaagcatctttgcagctgtttctttccaccagcctggggcctgctgggttcctgaaacctcagggtaagtcaagcctcagaggtcatcagtagccagtatccactgttctgcaccccttgggagaagctcgaagaacagggctgccaacttcttcagtaagatcccccaggtaaccctgaccccaagtagctccctcctccattaagaggagccacaggcccaggtaagccacagccacaggccacacagggccccaggctggaggactctagagctaagtctccaacatggctatgttacaagtcctaggtatgtgtggctgctgagcacctgaaattaggctagtccaaattgagatgtaagtataaaatacacattagattttaaagccttctgtggaaaaagaaggtaaatatctcattaactaatttttacattgattttatgttaaaagagtagtttagatattattaaattactatcagctgtttcttctttttacttggctacaagaaatgtaaatcagatatgtggcttgcattgccataccattggacagcacttccctggagagaacagaggaaatatcacaagagtcaaccaggaaggtcagaactgtgacaagggactaacctctccctatgcccagcgctggcccccagcacatgcaactctggcccttgatggcccaatccgtcctgctcctgcaggggatggcaaaccctggcaagaagctcccagaaggggaactgaagggctgttctatgacaaatattatcagcatcagaaagtcaaactgggtttcaggggccacctgagaattacaagtcctaacagatggcccaagttttcatcttctcttctgagttttagtacaaaatccagagaaacagttatagatctgttgccacatcaatgcctacaaacattcaccactcgcgatgctgcctttagtgctaatgcagcgcactcatttacagactaataaaatcggaagagttattattcctttaaaatgcagacatatctggggtatccacttaatgacgcatatggaataaattacttttggatgacactttttaattgaactgaactaacagcttagtaatatgttgcaataagaagaatattaggatgattaaaagatctaaaaactcttgcgaaattaaatgattaaacataatgctgagtaaatgaacaagcccgtgtatattaatcagttgtgggcctccagaagccgtcgtgtaactaaatgcacgtcacggcgctgcacgcgcgtgcctcctctctccctccacgccggctttccatcatgccctccttaccaccacgctgggcaaactgctttttccacagacaaacaatgcgttaagaatgcagtgagtgtaagtgttacaagagctattgcttcttggcaaacactcattcctttggttgttggcttcaagaaatggccgtgtcattaattttcagtccctgtttttaactgaaatgaaactttaaggtgcaaaaattaatagaattctggcttcctttctgattgtaggaattgacattcctggtacattccccttgttgggatgtctcctgtttcccattaagccactcacctcactgtgttttaatttccctggaactgttgcgtaccatgagtcgctcttaggaagctgggggtgagaaagtcatgttgggagaaagtgtcgattccaaagccccccggtcaaagctggctgctcttcagggtggaggaggaaaagcagctctgttgaggtcccaggagggcatcccctgcatccctccctccctctgccactggccatgccacccagcaccgtgcaggtgccttttgtatgacctagaaaactgattaacttccttatgcagttcatcccccgcctgctcagagataacccaggtaatttcttttctgattgtataaatctttcatacccaagtcacagtcataattagttacataaaaattcaggttacgacttaggctgttattaggaacatgaaaaacagtgaaaagttttgtctcactcactctctaataaaaactctcaaggtctctgttactgagaacagaagggacttggtatctcattaaggctaaaattcaattcagaacagaatctcactagctgggcttgatgctggggcggtggggggcaggaaaggctagccactcctggcaagaagtttaaagcaggtctgtgctctccacaccctgtatgtgtcgtggccttccctcggctgggctgagaatctgtgcttccaaaaccaatgccacaagaagcccagcagaggcatcttctcaaatgaaaatatattccccaaaccaaagtgctgatcaaacccatcttgcagcacatcacactggaaaataacacagtggaattccattaagccgatggctcctaaagaacaagtcagctttctgaaaagtcccagataaagcactacaattgtctcaatggcttaatgtaatcacctaccaggggcactagattcatcttccccaattgggcaaattaagagccatcgaaaggaatcacattcccacagttacccaggagactgagagggcccttcaagacgggcaagcagagcctcttcctgctgcagccacttccctccatctggcccaactcaggcctggaagcagagctcaggaagtagctctaactgaactccaacttacaatggaacctcagagagccaagtgtttgagttccaaggatggaggtaaagtttttcaaaggcttccagtcctgaagactgaggcccattgtgagttattaaactcgtcctttccagatggcacagcggattatgactatgcaaccctagacccagcaattggagtagttctgggctttggataatgtgggggttatcatacaagctatggggcaggagagcatagagtaggggtgacctgccctttacaaaatcccagtccccgcattgtcatctgaaatgcaagagtcagaccctcacctcagcagatctcattcctcactttcttgcagggcagaaatgctgaaaacattcatttgtcaaaactttgaaagccacaggactgagccaacaaggagagaagcaatcaggactttgtcatcagaggaggcggactgcccccacgtcctatcaaatttagtccggaatgtattttgccattattgtaactatgcccttcagctgccacgccgtttcaggaacggagcgctaatacattctgtggcacagtctctttatggggaggaaaggatcccagtgccccttgacagagagagaataatagcataatgcaacagaacatttttgaaatgctaatacacgctctccgcaacttaattttatttttttcttattggcttttttatatgacatttcacagtcctgtagcctcaatagctagatctgcatcgtaaaaatgacaacacggtgatttaaggaggagagtccatcagagcgaaatgggtggtgtgcttttaaagtatcagtttagcacctcttacctgggatcaatgttcattctcaatacatcattaaagcatcctgttaaatcacttggagagtggttgtgctcttcttatgcagccccaggtttgattatggagataatgaagtggaaccctgcaggaagggccatgttaggcacacgtactttattgagttaggggctaccagggaaggttgatctgaattaaagaaacttgagaggaaaggagagagagagaagcagagcaggtgcgtgggcatggaggcttccatcggaactggataggcagcaacagatgccgtcaaatttgagacctcctctctaagctttacaagcacagtgttcaccaaacccatattcataagggtccgagctgcagtgaagtctgcagtcagcatgtaagatgagagagacacactgatgggactggtagaactttccagaccccaaccaaagtgagctcaaaggcaaacaggattaacaggtccagcaccccttacatggagcagacaaaggaccagacaaaggaccatctctagtgagggcttgggccagagcattgggctgattgaaaaactccagaacccaagtgagcatgagttcctaagaacatatccttcaagtccagctgcctgtatgtggccatcgttagaccctgagacacggatgttcctcggttttctttcctttcttctggaatatattttgttcaaagtaatacatgctaattgtacactactgcacataagaagttgaaagataacccctcccaaatcccactgctctcttatcccccgtctcacgcctcatggataaattccactggcaatttgcttggacccacacaggctttctctcctgcatgtacaaacaccacacaggtatttttgtgacctgggatcagactccacacattgttttgcaacttgcttttctcatttaaaaccatttcaggtcagtacaaatagatttgcctggctctttctttttttttttttttttttttgagatggagtctcgctccatcgcccaggctggagtggtgcagtggcacgatctcagctcactgcaagctccgcctcccgggttcacgccattctcctacctcagcctcccgagtagctgggactacaggcgcccgccaccatgcccggctaatttttttgtatttttagtagagatggggtttcaccgtgttagccaggatggtctcgatctcctgacctggtgatctacccacctcggcctcccaaaatactgggattacaggcacgagccaccgcgcccagcctgcctggctctttcaaattctatttgaaaccaaaacataataaccaatcccctgatgatggatattcaggttgttcttagtttttcactagataatactgcaattggcgtcgttggtcacagatatctttgcacatctgtgcaagtataccatcggataccttcactagaggcttcctgacaactcttccaaaagtgactggctcttgtctccatgttttatggtttccaaagttaggaaaaaaaatgaaacagctcactccctcctccctgtctcaggatgagcaggaaggcaggtgaggtttgcacttggaccatgctcctgcagaagccgggctaccaagacaaatgagccgggcctccaccacctcccatttgacctgcaaagtcctcagaactccccaggactcctcagtcacccaggaactcaaatgtgcattagcccagcctttcaaacaacacccatgtaggggggtagtgacttgtctcactcaaagtaggggacagcacacaggccagggaggaattggagccctgggagtcagcatagaattctccatcatgtggtgtgggaaggcacagaccaaagttgaccggacccaaagtgttctgtgctgtaaactgatgacctgggagcttgggcgacaatagatgaagctcccaggaaggggaatctagcctccgctcttggtgaagacagtgctcatgctaaagcctgttgagtgggtttatcagttctgttctgattacctgatgtctctggctccttgattttccaagtgaactccctttaaagcttgagttgtgaccagctggatttttcagaaactactacataatagctaacattttatttgagcccattagttttggcatttttttaaggtaaaatttcagttaaatggctaatgctattgaaagcaaattcctccagagtcagtggcagacacagctcctcaatgatactgttcatttctgctgagcctgaatgtgtagctcacgtgccttctaaatgcagcccttcttgccccagccaagccagtgaaatgtggaggtcaggagggtttgcctcctatgtctcatgaccttcttcctgttctctggaccctgacctctgccccaagcaaatcacacctcccccacttggaacctatctagcagtctcttctgcctgtgtgttaatgactgacagcatggcaggcagttccttcccaggtgtgtctcagtttctgaaacacatcttcagtgatggactcaggtatccactggcaggagagcaacaccaagtcccccctttagcaagggcaccccaggagcactatggccatggtgcttcccttgctctgaccagcctgggcatcaggggagaggatccacttgagacctggggcaaattgcttcacctcattcagcctcagcctcttcatctgtgtgatgggcagatgttcctcacccggcctccctgtggggcttatgcggctgtggatatgagcgtgctttgtgaagaacaggttgtcattactgcccctgcctgtttaaccccagccccaggccctctcatgggtcctggggccctcctaagccagggctcagggacaggccctcacagccccatgcaaacacagtctgcagctttcagatggcaggtgttgggcctgtcctgtgcccgcctcctcaccaccccctaccagaatcctgcacctcctcctcccagaccccatctcctcccttttcttcccctatccccagaacctgttgaatcatcacccagtttttcctactaccgttcctcctcccgggaaaagtggtcctgagacatgggattgggaagactccacgtgtggagacacagcacaggagcccaccctgcccaactggcaggccagaccctccacctgtgtgacttgtggggacctttgtgctcttagaaggcactgggggcagcgacgtgcacatccttttctggttcccatgggggagatccagaaacgtcaggaccctcccaaagctgaggacactgagtgaggagcccacaagggggaagctgtggtcactgctccggacctccactgcccaggcttctctctgagcagggcagcagaggctgctttgtctgctgcaggctgaccaagagggagtcctaggcctgatccagctttcctggctcccaggacaccaggcaagcagaggacaggagtggacagtgtcctttaccatctgctgccacagactcccccactccttaatcagtgagagactgcagagctaggcagctgcctcacctgcttctcacagagggacagaggcatcctgaagcccaggttctgctgatatgcagcgatttgctccacagcattcctggctcaccaccttctttccgagcccatgtggacggcagccctggggaagggtggagaggcaggagccgggcagggcctcggcctcagccgggagagggccaagcctccttccaaaccacatgcattttaatgggcagatttcactgacaattgccctgcgtgtacaaggagctcattaaaccagagtgttgtttcaggacagcacaaagccgttctgcccacaacttcctaatccgtctgtagaagctgccaaggtcaggaccttgaaaatagtcagcagccatgttgggtgtgcgtgctgtggtctgtgtaccctgggtttgcccacaggggcccccacgcctgggctctgtgctctgcatgctcagaactgtctggccagcgctggctgggctcacgatgtccagtgagggcctcctgggagtgctcaggctcaggcagtgggattcggggctgccagctgtgtagtcatggtgtgctcacccttagcgagggcttagccactctatgtgggcctgggtgcggacaacatgaccaggacttgtagggctgccaccagcctctagggagagtaccttttggttggagccatttgacaatcccccatcgtgtgggtggtaggctgtgaagtcccaaccacactcagcacagcaaatgaggcccctaggagagggcccccaccctagtgtccacagtaccacagtacctctctgggtctccgctttcacatccccacatgggacaggcctgtcagtggcatcaggtccagcatgaccagccgtgcaggggtgctgggggaggggcagcctgtggagcatctcctgccagcctgtgggtccctagtgggagggggagtgactcccctgcgttcagactacaggccaattctccaaaacccaacccaccacatggcaaatttgtcaaaggatactttttcaaacgtttagtttcacccctacctttgtgatcattgaaatttatttttgtgggtttgtgtcctgccccacccctgccccagaggccccagacaggcatccttactgggtgcagggcagtcaccacacctgtgtcacctccagaggcagggtggggtaagggcagggcagagatgtcactaaagcctggaactttcacattgactttcagctgccaagtttgagttgagatgatctgggcatatttgcatagttttgagctcctctgtgaggtggtgccctccctggtggccagcgacgggggaaggcccaggacatttggagagtggccggcagttccgcttgtgtccagctcagtgtgagttgtgggagatgaggctggaaatcaggtgctggcaggccttcagtgccaggcagaggagcccgctccctccgagatgatgtggggggacggggcctaggaggtggtgctgcacagacccaccctatggccagcattcccagggaagaggccacctcctgccaccaaatgctgcagtccctactggaagcagcacagaggggatgaagagaaaagtgtggcttcagaggagtgggagggtgcctggctgtaattgttaagatggggagagtggacgagattttggttcattcatccctaaaatggaccattcactcagccagctggcagcctctgcctgtgcctcctaaggcaagccccacatcagtgctgctgagaagcaatttgccatgggtcaagatgtggagatttccaaactgacagatggcagaggagtctttggagaggaaacgaggcatttttcttaccaagacctgtccttggacaaagcatacatgacatgatagggttctcactgcaagataatttaaagaacctacccaagacgaagagagagagaaatgtcccatataagggaaagagatttctcgcatcccaatactttaaaactttgctgccatgcgtctgcctaacacagaaaaggttttggcaaaggcaaattgtggtgacacccactcttctgagtctccctcccagtcagctgcctgcacagagaccctccaccaccaggaacggcaggtgagccccccaagcctggtgtctgcaggagagtgtgatagccacacccccgggcaaggtttgggcttgtcgagctcaggatgaggaatgacagggggcctccccagagtgtaaccaccaagacacgggtgagttaggacagggatgtatccacacaggtgatctcccctgcctcgggcagggcagtgggtgggcagccactcccaacatacgaaaaataagtatttattttaagggtgtgcaagtcacatttttattgctagcattgtggttattaatatatagcacagttctcaacagcgccactattggtatttggagccatttaattctttgtcatggagactgttctgtgtattttgagctgttccatggcatcctcaggctgcgtccaccagatgccagtaagaaaccaccccctccccaagttgtgacaaccaaaaatacctccaggcattaccaaatgtctcttgagaaaactcactttgtttgagaggcactaatgtataccaaatgggttttacccaatctttccaccattgggttcagttccccacatccccattatactccaggctctgcccaccttctgtcacaatgcacaaggtctctgccccatcagaggctgggcccccactcaggctccgtgcccctgcctcacccactcagagacttttcttctgaaattctcccttctctctcttgtagcatacaattctccctctctatccaatcactcccattagcacacaaacacaacaccttaaaaacataacaagccaatatccttgaccttctgtctaccatcccatttctctgctctctatcatgacaaaacccttctaaagaatgcctcttcaccttctcacctcccgttctctgtccaacccattccaaagatggcttcattccccagtgctctaacgaaacattagaggtcccaaatgacctctgtgttgccaagcccacagtcaaatctcactccttatccacctagagctctcggccacactgggcacaagtgagccacaccctccttggcccttcttcctcagccctaccctcctcactggcccctgcccatcctctcgcctttaaacattgggggtcccagaactccaccctcagatctctttcctcactccacactctctccccagggatctcatgtgatcctgtgtttctaagtattacttatgcatcaataaatttcaaggttgcacacctagcctaggccactctcctgagccccaaactcccatatccaactgaccacccctcagcccaccttccatggttaaagacagaactctgcatctcagctgaaatgtctaccctaaccctcagcctctcagcaaatggaaccaacacccacacagtttttcaggccaaaaccccagtattcatcctggattcctccctttccctcaatctccccatccagtcaagcctgttggcccctcttccagcaggtggcccaatcagtctgcccccagcacctgctctcagagccatgctcggtccagagcgccatgcctgggtggcagcctcctctatcacccaccccccgacacccaaaccaacagagtgttgtcccaacaccctcagccccaccctccttcctgacagaacctgtttgcccacctccccccacaccacctgatgccagtcagggtggcttttccacatttgtttaggagtgatgtgacacggatctggccaaagaacctgaggggaagtcagctgggggcctcttggagaagcttctttgttttgttaacttaaaaaaaatcacataagtgtcaatttagaaaaggagactttctttcttataaaggattacagcctgcaaggttaccatcccgcaggctgggcagtgcagcctgcagcaaagaccagagacaggcgcttggaaggagaagggattgtggtcggagctttatgctgaatgtggttggccaagtagacatattctacaggttacaggaggagctgtggacatttaggaaggtggtcctggcgcatgggtattgaacaagcatgcatgtaacatatgacccattttcactttggagtggaaagttaacatttcactctattacaattaggccctttaggtgaaaaggtcttttcaggatgcaaaggcactcaagtgtgcagcctgtgtaaagcagacagaatcagtccagggtcagtggtcctcttatcaggagaaagttactgaaatcagtctctcatccagtcgaagctgtagttgcgacctgtagaacaggggctggggcagtgagtcggcctccaggggagctgcagttgttccagcattgcttatctcaaggccagtgcttgtttagctgctggaggaaaggaaaagcctagtggcaggtagagcgcagtttattcaagcatagggggtgcgagacttaacctttgcctgacatggcgttaggtcccatttataattgggtattttattaccacaaagagtctattctgtcactttttttttttttttgagactaggtctcactctgctgttgcccaggttggagtccagtggcgcaatctcagctcacgacaacctccgcctcctgggctcaagcaattctcccacctcagcctcctgagtagctgggactacaggcacacaccaccatgcccggctaattatttgtattttttgtagagatggagtttcgccatgttgtccaggcaggccttgaactcctgagctcaagtgatccgcctgcctcagcctcccaaagtgctaggattacaggtgtgtgccaccacatccagctaatttttgtatttttagtagagacggagtttcaccatgttggccaggctggtctcaaactcctgacctcaatgatccacccacctcagcctcccaaagtgctgggattccaggcgtgagcaccgcgcctggcctgtcactctcatgagctctgttttaacatgaatgctggtccattgttgtgtctaaactgcaaaacggagtggatataacaaggcgtgtccaaccttttatcccatcatggctgggaagtcagtttttaagagttttctggggtcttctcggctaagaggggggtccatccatttgggggatgtcttaggattttatttttagtttatagttcttaaaactcacatcctttccaccggatatgtacctacgtgtgatgcctccacctgtttgtaggcttcccagtaaccccgacgggcatcaagacagcgttctgaggactgcagaaaagagagcttgaggctttggtgacattcgggaaccatggaattaacctgcccaggaaacatgcagtggggccttctcgtgatggagatagaatttccgaattagccagccccatttccagtcaggattttctgttaatgcagctgaagaccatctcaaccaatacacagatggtctttaaaggtgtaaatcagaccattttagtctcctgcctagaatcctacaacagcttcttagaaaatcaaacatagactccttaccagaccacaggccccgccagccctcctcccaacatctccagcctcctttcttaccactgcccccagagggcttccttactccacgtttccactttctgctcgtgcccacagtgtcaccagttggagagggatgaggctcttccaaaccccactcctgaacccctctgccaaagtccaaatcaggccatcaggggccagtgcccctgcccttccaacaattgggctcagctgagctccctgccatgttactaaatattcagcaaacaagctgtaagagcttctcaggtgagccctgaaaacaggataccaggagtctctcatagtgggaaacagagtctgatcatggcttcccctggaccaggaggtggagggcggaggtccctgggagccgtgcttagagaggggccgggaggctgtgagcaatgtttcctctacaaaaagaaggcagcaggagctctgtggtccctgggagcagcagagctgacggctggcacaggaacccctcatcaggagttcatcagccactgtggcacgctcaggaaattggaatcaaaaacaaatacactgatgtaaaccgttcaaaatggtctgcagatgcctgtttacaaaacacagccatgacagagcattctcaggagactggataattaaacagaaaacaagttatatttattcatgttctttcaggacccagtggcttctcccctccctgcatgtgaagcacagtcccccatttggagagggcacagcctgtgctgtggggtggaaatggtgaagggatgcagtaggggaggctctgtgtctgccttcggctgctcgagcggcccgccggacacagtccaaccccaggaaacttgggacgacggggacccagatgataaagacttgcatctattctgcttccttggaggagggtttttagtaacaagaatgccacagtttagaaatcatcttcaaatctcattcactggaggaggccaagaaagtgatcccaaattacatttcaaatcaaatgccttgggagggttagggggttatcatcaagacaaagatgggacctcaatgttgtgtggggtccctggacctcccctcccagcctgcttcaccacaggaaatcacaccgtattatgcaagaggatcaagtcaggaacacgggagtcattcctgacacctcttttatccccaccccatccaaactatttcccagccctgtcccttcctcttcatctccacagtcaccacctgtctctctcctgaactactgccttggcctcctaaatggtccccctgcattttttccctctctcccaccagtccgttatttgcacaacagccggagtgaccctttagcatgcaaatcatgtcacatccctgattgacttaaaatccttctgatcatgagccaagatcgtgccgcgcactccagcctgggtgacagagcgagactcctcctcaaaaaaaaaaaaaaaagaaaaaaaaatccttctgatcacttttcatctccttaaattacagccatcagtccttaccttgctctgcctgctctaactagctatttcctgcctctgaccgcatctgtgccacatgcccttgccttgtgccatgtgcttcagctgcactggtctatttcagctcccagagcactccaagcccccaccctgcctcaagacctttgtatgggctgttttctctaactagaatgtccttgctcccattcttggcctggctggcttcttctcattttaaagatcttcacttaaatattctctactcaaagaggctttccgccacaccagcacccaccccccacacacacaccttaatagccctcccctgctactctcttggtattctctcatcttgttctttctatccgtaatgcttattgtactgtgtaatttgtttgcatgttctctgccagcctattctgagacaccccccacccccagcccttgctccctcagtccagcagtttggacgctgtagcaacagatacagatgtggagtgaaggagtgagctccctgtacagaaggtattctggggattggagccaaagttggacctactcttgttagaacattctcagaaggttcctgacctggatgacttggcctgtcaaaagactgtttcccatttccttatgacttcttcagtggaaatacgttaactggtatttctttcccttctgagggggtgtgttatgtaattaacaccagctgctatagaaatcccaaaatctcagtagtgtagtatagtaaaggctggtttcccatcctcatcaagtccgatggggtcaggcagctctccctaaacagtgactagaccatgttcttcactctcatcaaatgcatgacctccaaagacgaggagaggagagcatggatgatgactgtgttatcctccagaaaaataaaaccaacagaagatgtatatgtcttctacggaaccaataaaacattggcttctgttgaagccagtgtttcagtttcagtctgaaagcaggaaaaagaccaatgtcacagctcagcagtgagacaggagggtttccctcttacccaggctcattttttctatctaggtcttcaacgaattggatgaggcctgccctcattggggagggcaatcttctctactcagtctactgattcaaatgtcaatctcatccagaaacaccctcacagacacacccaggataatgctcgaacaaatatctgggtgccttgtggcccagtcaaggtaacacataaaactaaccaagacaatgacacagaggttgtgtggccaggcttggtcacctcctatcacctaccatgtcaaacccaatgacatggccccattctggctccaagagaggccacgaaatagtcataatgagtgcacaggaattggaagatgagctggcatttggaaacacacagcatggccccctcttgctagttaggtaaaaactgtttgctcttctccactgacttgctcaggagattctggatccaaccttagagatctgtatgaatttttgtaaattctgagtagctctgtataattacataaggtaatacattcttttcccccttaagacaccaaagtaataggcagttaggatactctccttttgcaaatatcttgagcagaggtatgcccatcatctttgggtgtagactcagtagggtgggagagacccatagagtggccaagctgaccaaggctaccccacacacaggaaccagcggaggtggaagagctggtatgcagcactgtgacagccatgcccctgctgaccaggaggccctgtgctctccacctcagcaaggaccctttgctccttctgatggatgcctctcctgcctgccacactgtggcaccccatgatacccagaatggtgatctcacagcccctgggcactgagttctgctctaacttcctgttcgtctgcacacagcagtcacattgaggtttagttttctcaaaactaaaaaggtgtattggccagaggaggctaaatggaaccccagagcctagagggatgcccaggtaaccctgcccctgcacaggccggcccctcctgcaaacaaggaggatactacatcagactaggatgtctcgatagcaggacacaggtctgccaggcacacagggagggctctaccaagaaagagggcaaccaggctttacaggagtcacgggcccttaacctggggtctgtagacaggttcaggcctctgctctccctccccacttaacacttgtcttctctgctaagccatgagctccaggttagcaagcactgggcctgtttttcttgccagtatattcccactgtatcctggctcctggtaccagctccataaataattgttgactgagcactagcctaatagttcacttgcttaaaactgcttattaagtcccttctgcgtggtaggcattgtattaggtgctggggatacaacataaataaaacagatatagtctctgcctttatgcagcttacaaaggtgtttgttcacaccagagagcagaacttgataactaaactgtaataaaagttgaagcaacatcaagcaacataggccagttgaaaaagtaaattacccactgacccgcaggtaattaactagtaattttattgccatccccaaaatgaagcaagcaagagggaatgacaatggcaggaagattgaatctggttacacgtaaggaaacaggagatttgggacagatgcaagtgctctcttgtgtggctttggagcaagtctggctaatacagagccacctgtgcaggctggatgcaccctggtgctctaaacaggaatgtcaagatgaaaggctttaagacatcctgtccccagcctcccatccacaaacattcagcagttatttgaaaggatcccagagtgacaatctctggtagacggaacagaggagacaaaaagcacaccatccctcccacccgccttgcccggctcaccaggatacgccaaagcagcttcactctgtaaacaccagccaaagtcacaaggtccgggagatgttgccctgtttgttcaggagacactgggcatgcgcactccaccttggctcctcccctactcgccaacttcacagtgtgactctggtcacagggatgggaccagatcaatagactttgtcactccaatgccccagcttctttggtggcacctaggtcacctgaggggtttgtttcaggaaagcacattaatttagaaggagaataatgtgggaagaggccgcagttagagagatgtgtctaagcgcctggcctgtgctctctccaaattgccctcattcccaagcaggctcctgagcctgagtttgccctccgaggctcagtcaaaaatattgatgtgcaggcaggttactgagcttttgacagggtttttttcacgaatggcatcatttgaaaaatggcaaatatccaagtaggaatgtgttccattagtgtgtttctgacataagaaaactaacaccagcttgacaagaatttgagaaatttaatttctatcactacaaagcaccagaatcctgtttgagagggtgctgatgggtttatgagtgtcttatcgagttcaagtcagtgtgagaaatagcgcctgagattaagggaaacctgtaataggaactaaaacgcagttctccaacaactgaaatgttatggcctcctgctttcaggaagggtgtttgttagcctgcttatggtaagcccattaattccctgtgactgcctcttctctccaagctccaagactcagggagaaaggtgaggacgggtgtttgtggcatctcatgtctggaaaaccaagggtatgctactgcactggtttgaagggcctagagagataggtcatggccttgagcccacctactgtgtgccatgccttgtgctaggcaccagagtgccagacagccctgcccagaatcccactgtgggacacgcagcctagctagtggtccaggaagctctgtcttgtgccaaccaacccacactgacttgggccatcactgcagtgtgacccatttgttttcatcccagggggatatcatgggaagccctgagctttgagaaccccccaactcccttgccctcctcagattccctacttgcagagcagctctccaatgtcagttctcatagcagggcgtcagtccctctgtgggcacagacttctgcccagtagtgccagacaagctccctgatgggctgctctgacccccaacccagccctctctttccaaagacaccagcctcagtgtgtagacacattctcaccccagacacagcgtctggctgagccctctctcactgacccctgatcacactctgagtgctgggcatatcacgtttggtcgtccagggaccttggaaaccttcccacatagtggctaatgagcccacagatggtcagtcaacacaggggcattggagccacagccaggagccagaaggaccactcgttgccccctagagggctgcatgtggcatcttcatcttcctctcatgtggcctggctccccaccagagcagagaccaggcctggggcttaactggtccacagccctgcagatgtggccagcgcaggtgaggttcaggagatgtgtgatcactgaacacagaaggccatctccacaaattccagaccctcgccatcaggatgtgaggctcaacaggatgatggggtttgcttagttgggccacatctcctccctgtgaaagctgcccccatcactctccagagaaggcgcagggtggaggcaagactgtagtagcctaaatcaggtttcagttctgacgattcttaccgtcttcactgtatgactgcggctatctgccctgatcacgcacgatgcccaggcttcccgatgcagttgtgatgcagatagggggaagggagggggccctctctgcatccctatgatggtcatagggtgtcaatctgcccaatataccctttccattagccattttaccccagcccaaacacctagtccctgcccctggaggtggccacacggcccaggcctgatgggccaatcagtcccacacctgcacaatactcagtcctcttgccctcagtgtttgcttcagggaagaacacaggagctgtatgtggccaatcagagctcccccatgctttttccagggctctcaggcaagatttgttcccttcctctgggatcccacatacagaaacaatgtgagtgtggggccaccaatggacatcttgcaaccaagtagagaatgccactgtcgaaggccctggatgcctgcaacctcttccacctcccttagatttcccattgtgggaactaaaccacctttttccccctaagctattaatagttgagcatttctgagtgtttctgttactaagcctgaaaaagttctgataaattcaccaggacagtctctttcaatcttcttcacctaatatctgtccaagtgtttctttacattaaaacttcagggtcccagaaacatcccatgaggtcatcttggaggtaggggccaatagtgtgaggagctcagaatggatgagcagcaggtgccaagcaggcccacgctgaggtctgaagacacaaatgccatggggagccagctggcacagtggtaaataatgttggagacacagcagggtcaagactggggactcttctggattctatgtggtgatctgtgggtaatagggagccattgacagctgttgagcagggctgagatgtaccttgttctgccagtggcaacaagacagttgcaggcagcaggggcaaactggaggggtgaccatgaaggaggctatagggggcctgggatggggcaggggagtcctcaaagggtatcgggagggaagccttagtgggacttggcacccattggtgctgccacttgaggcgtcacttttaccatcatgggtaagtgggcaaagaacaggggcagatgacacttaggggcaagaaaagatgcagtgggagcacttgcaagactcagggggtctccaggggcatgaacatagaataatcggctccgagtcaaaagcgaggggggcccaagccctcattgtatccatgtctaaactgaggcccagtgacaggaagggagctgccaaggccactgagcttgtcagcagcagagccaggcctgggggccaggtggcctgccctgctcactcggggcctagcacatgatgctgtctcattttttactctccctggaagtcaccctgggaagccacttagtcctactctttccatttagcaaggaaggaggacccgccagggggaggcttgttgaccaggaaataacggggagtgagggtggaaggagagggctcagtagccataaatcccttcagaactgtgaaaggagctggggaatattgacacaaattaaatccaataaaacattcatttaattaaactttaagtgatccaaatatttgctgtttggttaatattcatgtagctgacaggagcagaactacgatggttctatcagtattcacacattctaattttgcacgagtttttcctgcgcaaagtgcacatcttctacatgcaaatggctgggaataactcagggaggatgcagcagccagttatcccagccagcagaggaccagagggacacagaagacttccgtctcccacttggatttttgtttcctattagccccatgtttgaggctcctgcagacctttctctagagccgcttggaatatatgactttggggccacatggaggaagggatcctacctttcacatcagtcctatgttccaaatgaggggccatgctcctagccttgtgtctagagccccaggaaaccccagcctaccagactgcctcgtctccctgtctcccacctgcattccccctctctatgtacccagagcccttctcatcttgtaacacagtggttctcaggccatcatagaaccccttgggatgcttgttaaaatctggatgtccacccagcccacttgttaaaatctggatgtccatccagcccaccagagcatctgcatcagcctgaggcagaggggcaagaatctgtgttttaattacccacccccagagatatgatacaggtggctggggagccgcacctgagaagcggatctctagggcccaggggaagccctgctgctgcctccaagagcccctccccgatggcccaattggtcttttccttctagtctgaccacagatcagacgtgcagggaaaatctgattccttttgtaactaacctgactttacaagcctcaccccaatgggagaaaagcacaactaaatgctcaatccattgtaaagattagcacgagctgacgattttaacagtccacgtaagtagtgctctgtctaaaaactgctctgtgtctctagcttccaccccacgtcccagctgctctccccggctggcttctgagtgtccagggaagcagcgtggtggtgcactgcggcctcacttcccacggcaagggactctgagttgccctgtctgaggtcacttgaagctgagctcagccctgggtgtgctcatgatctgggctcacagtctggtgtactcgcgggtcaggatattcccccaagcaaggcctcccacagccaccactggcctccatgccccttgaggccaggagcacttccctttggaccttggtctggcagcccaaggcagttctcaggtccagatattatgttgctgaacaccaggggttcggtctaggtctggttgttcacctcacagaaagtccatcactgagtggatggaatattgccagggaagaaaggctttaatctcaatgacatcagcctggaaatgggagaccggttgcaaatccatctctctgactaaagttcggggtttagatagcagggaattagggaggggtaagacaggagatggtcaataggcagcaggtgtgtctcattgtccggatgcagtgatctaggaggcctggtggttggtttcctgttaaaagaactcagatgaaacaaatttaagtttctcaagcttcagttatctgggaaaattgggcctgtttccataccaggagccaaggtggttctggctctctgcccagacacatgcggttgccccaggtggcaggaacagcggcacaaagcctcgtggcccaggggagcctcgtggtcatctgatgaggaaaggatgcctcctctactcttggggagaatgctgaggtctgagtcctacagacccgcagagtacggtgggagctaaaccattttagcaaattctcattctctctctttcccctctccaaaggccgggtcatgctacagagttagtgccttctctctcctgccctgggcaataagcctcatgactcggagatgggagggtagtgagcagaacttgatttaagggggaacttgaaatgcatcactttattgttggtaaaatattatgccagttgcgtctgcatccatcactgggtgctcatctttccttgagggttccctcaccgttagtcacatttttcctgtgtgtgattgtcccctccccaccggcctattggctcttttacttctttatttcattttctccatttctcatccatccatccaacagcactgatgaagcacctagcgtagcttgttcatctttgtgagcccagggcggagccactcagcatctgtggaggaaggagggctttgctgctcagggtctgacctcaggaccctgtttcaattcagctgctctgctgtgccttgcacctgcggctgttttcgctccctcttcccctctcccacacacacgggcaagagggtgtgagcacaggtgtgctgcctgcggggctgctgctgcctggtcacagctcacaagcgtcccgcagaatagcagagctcagctcccaactctgcttcgttccagttcagggggatacatctgttggggtcccccaggtcccaatagagtcgtaagcatgaatagggaatagacaaaatagtacccactgcaccgagagccagcctgcttccctcagctcatgccacctctggctattgccccagcctccctgagtgcacagatttgggggaagagcaaaagggagccagtcccatcagtgggccgctgactgtcccccaaagcctgatcccatttggtcatttgagcagcctgagtttgattaattttttcataaatcctgagaatttcaaaaagcttgtgattgcagagaactatcttagattcttcccatttgcctgaagaatgatcagtcctaatgccagttatcaagttcaaaatggcaaggattaatagtttctgcagcctgaagtattcttcaaaaaattaaaagctacagtgcattttcataggacagaaatccaaatccaagttcagcgaatccttagacagaaacaaaccttcaaagatcagccagttcattccccagacttcagacagcgcaacctttaaaactgaccccagatggatgagaaacttgttagctcactcagcagaccttgtctgcacttagcaaggcccagactccaataggccaggggagctgtgagcagggcgctgcacccctgccccccggtctctctgtggtgggccccctggccttcgcagcccacattcttggcttgacacaaatctatggcccagattgtcctcagcacattacttatggtttttgacctgtttggactcacatagccttttgggcatttgacctaagtcttggctcctcgcccagcaaaagtgtctatctctacatttagtcagcacattgtaaacaattttcagggagtcgtgaagcccttctgggcctcttccacccaggaaattcatggctattcaccttgagttgagactccaatccctgggcctgcacctgaccgtgcctcctcctttccctctgcagaagtggttcagctcagcctcgcccccgaggacagggtcagtgtgaccacagtgaccgtggggctgagcacagtgctgacctgcgccgtccatggagacctgaggccaccaatcatctggaagcgcaacgggctcaccctgaacttcctggacttggaagacatcaatgtaagtcacctggaattcactctgagctcaagcgcacctccctgggagagtacactgggtaagatgccacagacagtggcaggacgggagagttttagtttaacatcctgtgtttggtgcttttctagcctgttgtcagcttggcagtatcagaaaatccaagtcccaccacagcagaaaatagatgaatggtggccatgctatgtccggctaaggaagagaagagagatgcgatgggtgggacaggaggcctctgaacggggctgcattagcaaaggcctggaggtgaccctgagaacagactgtgtgggcctgctcacagggctcagagagatggaccacaggccagcagagagagcagcaggctccacagctgagagaacagtgggctgggggaccttaggaggaggttctgggccctagtgctgggtaggctgtagacagctgtgtgcagggaaggggtggtccctgtggagggcagaggtgagccactgggctgggttggctggaagacaaatgccaggtgccagatgagaaggtagagggaaaccaggtcaggccagaggggacccaccttggggacgttcattgctgggtaagggaatgagggtgtgatgagttaagtggtgctgtgtggaagaagaaagcaactgagctcatgcagcctagtgtggccatcagggggtacgtctgtgccctgaggaaccaggcagcctccgttggggtcccagcatcacccacgtcagctttgtgactttgagtaatttcttaacctgccgatcctcaatgaattaatctataagaaaaacgttagcaatacttcccttctattagacttaaagaagtggcataattcaaggatatttattggtccaggtttggcacaagaggtgatgtggcttcccagaagttcatgtgagaagacagagtgatgtcacccatgtagtgagctgccaggacagctgacgggtcttaggttacagtaactggaatataattttcatgcagaagagagggcagccttagccttgttggctcaggacaggacagctggtccacagtgggatgcttgcccagaaaagaaagacccatgggatgaatggtcagttcctgctaacatctcgaaggtggtggggtaggggctggggcaaagggagctgacctgggctgtgtgaccccctgagttggactagcacaaggtgcacctcaaaaggagatcaatttgggctccttagatggaaccccattccagccatcaaacctgccccaccatggagacagagccgccacaggaggcgctgagctccttatcccaaggggcatatgcaagctcaggcagggactgtggtcagcaatgctgctagccacaagagggcagctaaacccagtgaccttggaggtcccttccaactctgagacttgtggggagagagacccagcatgaaatgctgcaggaaccaccaaagttagtcctctcctactctctaggccccttcagctacaccctgggggtcatgggggaagcagatggaaagagggggccactctggaggttctaccctgggcagagctgccaaggagtgcccttcccctagccttgtcacactggacaggattgttttcttgtgatttcccaccatggtgaacatagccagtatcctatacaattttgaatgtcaatgcagcacaatcctggtgggtgcttgctggacagatgctggatgggcagaacccttcattttctgggcctgcgatggccagggcttgtctgagaacttagcaagaaagagcagtgtcctatctgtaaagactggactgtgttggggtgcatgtttgtgagtgtgatgtcctctactgtacctgctcacaaggtgcagtgccagcttttaaacatgtttggccaggaaagattgatcagtactgggacagctccacctgtgtctgtgggagcatttcatgtgcattacttggcgctccactgaaagacatcagaaataaaagcagaggcaaaactccacttaatgtacttgccatcagttaattaaattactttgagtggtcttcctctccctcaaacatgcctccagcaccaactcaattgcatttctacttttcacaataaggttagcaatttgggtaattgtgggtgcaaccagagatgaatggcccctcattatctcccaggaaacacttgctgctcgtggttgagtcagtagcccgcaaataggcagggcccagtgcttctcagaaccccctacacgagggagcagggcagcaccagccccgcaggggtccaagcccgatgtgtacaaacacacaaaacacacgcacacctcccctacctgagggaaggaggcggcacagcttcctagggaagggcatgagcctggggtctgccacttactaactagaaccttggaaagttactagtctagtaaccttgactgctctaagctccagttttcccttctgtgaaatggggataaataatggtaccagcctcatagggttccagtaaggactaaatgacaatatgcatgtaaggctcttcacgtatggtgttctataaatgctattatcactgtcatcattactattgttactatcattaatattattattgtattattattcctgctgctgctaaataatattctcagcagcttgcagcctgagtccccaccaagcagccagcaacagctgggtgaggctccctagtcaggcagataggaccttggcatgccccccgctgctcgcagtggggacggaggtctcactgtccacgtcagccttgactcacgcagggagggaggcactgcttctctgcctccagcaaatccagagcagcttcgggtgagctgttggacttctctgagcctgtggagaaaaagcatgatgtgctccttacatgggcattttcaggctgaagtgtaccaaggacccagctcagtgcctggcacacaagaggtgctcataagcagtaggcccacttgggacggtgtggaaagcaaaccttagaagaaatcaggctgaagggggctaaagccaggtcatcgggattcacttgcatttttgaagcaagaattaggggagaacagcccaggagtgcaacactgatgcagcaaagattctggggttgatgaggctcccagagtccctcagcctgaggtgtctcagtggccacgttcaccccacggcagtgggagatgaaatacgatcaccggcattgtaatcagtggtgactcccaaacacggctgcacgggggcaagctgatcggccttcaaaacccaaggcggggagatcacagagcacgaaggagcgtgggcctcctttctttgtcgtttgtatgagacatcttgattggcaacaaaatattaaccactttttcactactctcttaatgagaagctttcgtgagcaacaaaatattaatttgtcttatctgttaagaattctattaatgaattcagtcacagagctattacagaatgccattctaatgacacatgtaattaaacttttctgacttgcaaacatcaagcatgccctgagcatcagaataatatttgatcagaaagtaaatgtacccctctcgcctggagccaagtaagaaggagccagtcagattttgcagcgagtaatgttgctctcagaagcacttatgagtcacccaatcgtgtgtggcccatccaggtggcgtacatggggagtcatcatttgggttgactcacttgctaagtgcctgagagtcacaagctccgtaccagagtagagaacaaagacactgtccgcagcctccagggaggcgaagtaaccactaacaactgttctgggggcaagagaaaggagcccttctgactggggcttcaggagacaggaataagcgagtgagaaagaagtgtatagggacagactggggctagaacataaaggtccttgaatattaacattaagagtcttagcaattgccctgtgggcagtggggaagcgcagatgtttgatgggggagtgacagggtcagatgtgtgtgctgcaagagtctggagcgccttttccagcctaagattaaacatgcatccaagagggagttcacataacagagggtccagaagtgaggggagccttgttgatgttttctgagtcttcctcctctctaacttccccaatggcacatctggagtgcagcagtgccccagggtctccctggcttccacccaaggctcccctgatggggcagtggttcagttcatgatgtcttcactttgccttttttttttttttttttttaggcagtagggtctctctctgtcacccagactggagcacagtggcatgatcttggctcactgcagcctcgacctccagagctcaagcgatcctcccatcacagcctccagagtagctgggaccacaggcatgcaccaccatgcctggctaatttttttatttttttgtagagaggggtgttgctatgttgcccaggctggcctcaaactcctgagctcaagtgatcctcctgcctcgacctcccaaagtgctgggactacaggtgtgagccaccgtacctggcctttgccttcttaaggttgtcaggaagttcagcctgggcctggacctggtatgtctcctaaggacacctgagccactgccttgcaggaggctttagccttacccagcccagcttgtaagagggaaaacaaatccaccactgagcagaggctagaattatggacgaatggtgtaaggcccccaaagacaggtgcaccccagcagatcagcagcccagggcacatgctgcagcccctcctggcagtgggtctctggattatgacgccgccttctgtttgtttgatgagaaatcagtagtgtctgctcacgttcatgttccccagagctaacaaagtgcagcctgtaatttgtttacttcctggctgactgtgggtttcgttactgaagcagctgtgtgtctggatgtgcttctgacctggccctgtgtccccactcacctcagtccttgaggaggcacagcccactgcccccacctcagaagctaagcagaggcgtggccaccagcagcaccctgtgctcggcatgacctgggcctgggccaggcggcccccaggagtgtgcctgtgcttgtgtctggtagaaggggagactttgcccccagcccctgctgtggggcccccacaaggggccattccctggtgagattcccctgtagcccctgtctcctggggactcaggtccaggctttgggggctggggtgagacccatctcagaagcagatccacacattccctccctactctggcccccattctaggtattggggttgggaaggatggggtgctgcctcactttctgcagaaacagaacatgcaaacccattctgggcctcagccctctgcttctctgaccacccagcctgcacagcggccactcggagggtgaagtgactgtccccaaacctagtcggcacatcctgcctcaacaatgtcacccacccttcatctcataactgtcttcctcactgtcctttatgatcctgagggccaggagacaggaacgggcagaaacagggacagggcatctcaaaagtcacaggtaatggctgttgggttgaaccatcacaagtgttgttgccagtgttgttaccattcatacacggtgcaggctccgtgccggttgtgaggtcataagcatcagctcatcccatacccctgccccatgaggcacgtggggttaactcattcagatgagtggagaacttgcccatgggcctacagccacctacatgccctggcccagagctctctgggtttcttgcttgtgggacataatatctagcccccagcaattccaaatctttgctgtggggctgtctgtagttcccaggccccagtggaatgtatcaaattggatatgggtccctgtgtgtggagctcctattcttactggctgctggcctctggccccagcaaggaaggaagcaacatgctctgagaccagcacgtggaattgtttagccaggatattctcagggagagaaaacatttttctattgtattcttttttaaaaaaacagaaaaaacaaaaaggcctacaacaaactcagtatatttcaaatgacttgaaagagccactcttttttgttttgggtttttttttcactgaatctcgctatttggggctttctaatgtcggcaggcagagtacggtgataaaagcaaaaaacaaaacccattagaagaaagtatttgtggcagtgtttgaaggatgtgttaaaatgttcacttttctccccatacctaaatggtataaaaccaggaacaaataattctaatgaagcgtatgctctcagctagctcttctttggaagggagttattaaaaagaccaaaagaaaatgatttaggagctcatgactcatttaatttttattgtctttatatgaaccagtcatgaattcattgtaaaaagatgagaggcgtttgattagcatggagagctgtttgcaccacgatagacagtggttgtaggctctgcattaaaataatctcattaaatgcttgggtacattttgttttaaaatcttagaaaacactacatttgaagcacttaaaggctttggccaattctctgtagcttgtgtcaaaaacatctgaacatccagttctttagagttttgaatgtgctcaaaccattgggagtagtgtccagagatctccaagatatgggggccggggcctatggtactccagcctgtggaacctgtggggtgactctgccctgccaagtgtctcctctggcctttgctttctcagtgcctctttcgaggtcctctttcccctcttaggggaaagccttaggggaagccctggcctcagggcttgacttgtactcagtgaccacttccggccccatctccaaggtacagggtcccacaggaaggttctgattcagcttctataccctgattgcagaacccaggaactccccacagagtctcttcctccctgagcctcactgcctccctacagaggcccagtcaatgaaggaggccgattggtgcctctcttggccactacagattggagcctacccctccaaggcactctctgcactaagcaaggacaagggagtcaccaggaggtcctgcagcccatgagccatgcccaagcactgctcttcctggactccccctccccagccccatgcagctgtttcaggttttgtctacagcaaacaagactgcagtaaacatccttatacccacctctttgcacatgtgtgtaagttgacgtgtaagataagttctcggaagtgatgcattttcagttttgatgggttttgccaaatctctctccaaaatggctgcaccagtctacgccctctccaacaatgtgtaagagttttgaacacagtgtcaggaggaaattcctaactgaaagtcgtcttggtccctgaaatgagccatagaaggaaatttatttaaatcctctctggagtgtctcaacgacaggaatcagctgtcatggctgtgagtgtggtccaagttagagtcaggagctgaaacccttggtaaggccttctcagcctggggattcaggatccaaggatccccaggaagagggttgcaggtttcccaaaggaaagcagcaggtgtgaggtggtctggaacttcagatgactgctacagtgcagtctagaacctgagtcccttcccgccccagctggggatgccaagctaattagccaaggagccaaagccccattcaagggctcaggcctgcacctcaccagagggccccattagctgccacccctactacataacactctggagtcctggcatgtcaagaggtatttgcctgctggcctctaagggtggacaagtggagggctcagagcaatgtctctggcatgagccttctgttgcaggtgcctgggcctctgtgtatacccagataatcaggtttgtccctatacgcaatttcaacacgcataccactaggtcagaacttccctatttgagtttttgagccaactgaagttggctcttcgacagaagacaccctcacttctgacataaactggaagtcaggtggttcccaaaaccaccctcaggttcaacaatttgctggaaaaacagaactcattgtaagtgttatactcacagttaaagtttaatacagcaaaaagagtacagattaaagtcagccaagtgatgaagcccaaagggcagagcccaggagggctctaaacgtggaatctctgttctcctctcccagtggagtcacagacatgtcactgtcacagtgtcaatttcccagagaagctcacccaggcctcggtgtccaaagcttttgctggagctcattcaaatactgcccacatggctgccctctcgtccccagcccctctagagacagaactggtaccacctggcccaaagaccccaggcaaataaagagacccctatgaggcatgacattccagagcctagagattgcctccctgtagccaaagagggcaaggccagacctccctgggtaatatgaattcttaactatccttcctctcagggcttcccaggaggtagcatcctaggctaacacactccctgaaatcagcaaatattcattgagctcagttatgcacaggaaccacatgacacgctgagaataatacagtcatgcacaaagagatgagtcatgcgcgaagagatgagtcatgcgctaagagataagggcctcccctttggcatccacagtcagaagaagactgaccgcacacaccagaggacacccaagtcagccagggaccacacatgccccgagccttggaagaaccaggtgctctccccacagtggcttctctcatgcctccaactccctcttccaggcctgaacctgggaacgagcaggaggacaggcccactccaggttgctcacactgaatgcagctgcccacaacagccctcttccagggggctcagacagctacttagagattgctccaagttgcagagacttctttttcttgagaggactctgagaaaaaggatggttcctcaggtctttgcaggatggcaagtccgtctattatgtccggaattggtgggttcttggtctcactgacttcaagaatgaagccgcggaccctcgcagtgagtgtcacagttcttaaaggcagcgtgtccagagtttgttccttctgatgctcggatgcgtttggagtttcttccttctggtgggttcgtggtctcgctggcttcagaagtgcagctgcagaccttcagggtgagtgttgcagctgataaagtcagtgtaaacctaaagagtgagcagcagcatttattgcaaagagcaaaaagaacaaagcttccactgcgtggaaaggaatcccagcgtgttgccacttctggctccggaggtctgcttttattctcttatctggccccacccacatcctgctgattggtccattttacagagagccgattggtctgttttacagagagctgattggtccgttttgacagggtgctgattggtgcgtttataatccctgagctagacacaaaagttctccacggtccccactagattagctagatacagagtgtccacacaaagtttctccaagtccccaccagagtatctagatacagagtgccgattggtgcattcacaaaccctgagctagacacagggtgctgattggtgggtttacaaaccttgagctagatacagagtgctgattggtgtatttacaatcccttagctagacataaaggttctccaagtccccaccagaataactagatacagagtgccgaatggtgcattcacaaaccatgagctagacacagggtgctgattcgtgtgttgacaaaccttgagctagagacagagtgctgattggtgtatttacaatcccttagctagacataaaggttctccaagtccccaccagactcaggagcccagctggcttcacccagtggatcctgcaccaggtctgcaggtggagctgcctgccagtcccgtgccgtgcgcccgcactcctcagcccttgggtggttgatgggactgggcgccctggagcagggagcggtgctcttctgggaggctcaggctgcgcaggagcccacgttggcagggaggggggtgggggtgggggaggctcaggcatggcgggctgcagatcctgagccttgccccgcagggaggcagctaaggcccggcaagaaatccagcgcagcagctgctggcccaggtgctaagcccctcactgcccggggcttgccggctggcagccactccgagtgcggggcccgccgagcccatgcccacccgaaactcacgctggcccacaagcccctcgcacagccccggttcccgcccgcgcctctccacacctcccggcaagctgagggagccagttcccgccttggccagcccagaaaggggctcccacagtgcagcggcaggctgaagggctcctcaagcatggccagagtgggaaccaaggccgaggaggctccgagagcgagcaagggctgcgagggctgccagcatgctgtcatctctcactatgagggactagaatgaagtgaatgtcgccgtaacctcagtgttggtcgggaaggtcagcactagggagccagtatgttggtacgtgtgtgcactcatgcgtgtacatcatcatgtgtaccacgtgtccatgtagatgtttgggtgcgctccctcccccatgtgtgcacactcgcatgtactgcatgtgtccatgtggatgcctgtgtgtgctcacccacatgtgcacactcgcatgtactgcatgtgtccatgtggatgcctgtgtgtgctcacccacatgtgcatgtggtcctggcttggtctggataagggccagggaagtctagacgtgttcgaggaatggccatcaccgaggcaccacatgtcactctgtgtttaagtttgctgcatttgactgtgcaggtgagatgctacagttagtggcattctgggggccagaattgaaggattgttgggggagagaccccccctttgctccctcctcccacaaagagaaccaggggtgctcctgaggagggcaatgtcggaaaagctctgaataattgtttctcaactgagtctgaacttgtaacattgacagtatcattaacctaaactctaatattactctggagtccttgcgttgaacatttagtctctaaatattcagtattgatgactcatttccatatatacctgactcccatggatcactatgacaacatcccccatctcatctctgcttaactattgtttaatacttaagtctcatttaattgtgttctttattaagggcagatacttagaaaatcgctttttaaaaggtgagaaccatgtctttaaaattgtctctttcccagaaaacagatatgcatcaatacaaagaatggtctaatctgacatctgtttatttctgtaaggaaccttgattttgctaatacagttctatgcatcagagcaaaaaaaaaaaaaagccatccataaagagacaagtacagagatgcaatcaagcgttgatagcagtattcagatgcatctcaaagaacattcaggagaggaaggattgcaggcttagttttatgtagcttcttataaatcaattgttaaagtaattttctcttctcacatccaatgaggtaaatttgatttctgtagccagtattcatatccagaaaacaatatgcgctttgttctgtaattatatgatgcctatcattttcacccagagacgttattttacttattacagagtcagcttctcctccgagctgaagccacagacaggtaatgcttaggttctcacggaagagccataacacacccaggagcccctcaagtcctccaagggctgacacacacccccctcagcacctgagtgattgcccaagagttaagtctctgctcctggggagcagggatgtgtacttggtaagcaggaaagaaacagacagtgaggttaaatgactgtgttggaggcacagcacaagtcatcagtagcgggtgggaatccatgcgcgatgggcttttccatctcttcctgctgctctgagctttggtcaattccagcgtgccccagcctgaggagtgcaaaagagcctcgagttctcccgagggctgcaggacggagaaggggacaagtggggaagtggggacgagacttgagaccagtgctctgctcctcccgccagctgcctcattttgagcctgtgtggctgggtaatatttgagtggacaggaaggcaggtgggcacctcggctgtcaaactgaaagaatcccctcagaaagcctagctcggtgccctgtacagtcccctcgacagctattttttgagggcccactgtgcaccaggactgtgacaggcacacagggcacaagcctccctgccctcctctgcagagctcacattctgcaggggaagacagacagcaaacaaggtaagtacagaaagcagcaggcggcacagcagtgcgtccacaggaggcgccaagcagggtgtggggaagaggttaggctccagaaatggggctgccagacaaggttggagcagacttgcaggagagggagacagacagacagcctgggaggaggggagcatgcctggcacactagagcaacagcaaggggagtgtgcgaggcagtagggtctgagaggggctggcccccagcaaacaaggctctgagtatgaggggcgtgatgtggctggctcagggcagagtctgtgggccggaagccggggtccctggcatcacccaggaaggtggcagctggccagagcaggagcgatggaggtggtgagagaagaccccactctgaatgaatctgcaaggagagcctagtgtctcagcccctggggaactgggcttttgttttgttttctggattggggttttcagggtttttttttcctgaggattaaatacatacaaggtgacgtgtaagttcccggcacacggtaacctcttgaagactgtatgttggtattaatgggtatcaacctgaggttgatatctgggaacagtggccttgggacagccctcagagcccagggcccatctcaacctgaggaatgtggtggtgctgatgactaaacaccaccacacaggtggtgatgagggcagggcctgccagagcctgaggccagcttcaagggccatcatgagaaggggctgtggatgtgaaggctcaggaaggcagtttggagggaaaatgccagcaggtccacagcgccaggctccctgcaagcagctctggtttttgccctctcggatggtgtctgccctgggacccaccaactgggacgctgaggagtttccaagccctgccacccttttccctttgaaatggctgtaccatttcaggatgccatctcaccactgagactccaagctaaacagattttcctccagacttaagttttgacacaggaaacagcttagactagaaatatgtcggtcccagaattgactagtcattaacttttcataaacaacttagatatgaaccttttatgactcttatgatacaggacaaatcagctatctggtgttttattttatcatggaggcttccgcagaatggtagaaaagggctctttgaagcagagcagtgtttcacaacaaactctcagggtttccgcagccctctgcaacattttacttctttgagagcactgctaggagtttttatcctgaccctccctgcaagcaggctgcatgtgctcaccatctaccttcctgcctttgccctaccccaagcttcactctgggccggcaccccttcatccagctaattagccagaaagtgtctttttttttttttttttttggaggtggggtctcgctctgtcacccaggctggagtgcagtggcacaatctcagctcactacaacctccgcctcccaggttcaagcaattctcctacctcagcctcctgagtagctgggactacaggcgcccgcctccacgcccagctaatttttttgtttgtttgtttgttttgtatttttagtagagacagggtttcaccatgttggccaggctggtctcaaactcctgacctcaagtgatccacctgcctcggcctcccaaagtgttgggattacaggcatgagctaccatgcccggctcagaaagtgtctttaaggggtttcgggaccattgtggccgggccctctggagtgttagcaagagagaacatcagcatttcaggaacaggagctcacatgagtatcagcggaggacccagggagctgccctcagctgcttttagccctcatgccaccacggccttctctcctgccaccagaatgcttctgtgggaaaagggagctcagaaagggccagggaaaggcaggagggatgatttggtgttttctccaggggtcaagaggagttttgcatcttctgctaataataacaagaaaaataacatcccctgtgtatatcatgcatcccacattcaaaaatacactcacatgcattttctcaccggatctcccaacaccacataaggcaggcaggccgtatatattgtccacaatttacaggtggagaagccagtgcccagagagactgggtacattggtcaatggcagagctcaagctaaatcctggatgtcctgagttcccatcactccccacagatgacagtgcacaacccccttgctcattagtgagcctgggccttctctgtaccatcagctctgagcaccatatcctgggaaatgtttggtagccaaggcccaacctgatgagggctctctgtagaaaacgggtaattccaattcctggcatgtctgtagttggtgcctggaagggccagcattgggcacaggtctgcaaaagggaatgcagctgactgggcaagtgcttggtgcccagtgctcatcaggggactctgatgcagccaaaagcccctcctgcccatccctcctctgtgcactggcccagtaagaccccatcgtgtgaggctgcagagatgacagtgctgaggcttattgagccatttcctgtggaacccatgggcatccgcccttcctagtgctctttgatgttcctgccctggtttttttgtttgccccattttccctttagttctatttcccttcccttgggttaccaagatctctgcaagcagcctgaaatcatgctgggattgaggtgggatctaaaccataggcaggccaactgcagcccatgggccaaatccaggccaccaactttaaataaaacttcagtggaacacagccacgttcattaatttatgtgtcttgaaggctattttcatgctgtagtggcggagttgggtatttggcagaaactgtgctacccatgaagccaaaaatatctgctcgctagccccttaagaaagtcagctaacccccgctctaaacaaggcctggcctccggaaacagagctgctcatcaggtgagcaacacccctgagaatcaagcaggcagccggtaaatggggggacacgtgggcctagttgcttgaaattgagagggcgtgtgctgggggatgtgttcaaaccgggcctcgtggaggaggggccaggtacacaaggccttaaacagatgcagaggtctgggcccacaatgtggaggcaagatggggttgctgctgcccaggacggctcacccctgcagacagctctggctgagcaagggccaggcagaaaggaactctctcccagctgcaggatttctggaaaaccaggagacagctatggtttccagcccgttcaataaagaggccagtctcatcgtcatctttgccctgtgcaggactttggagaggatgattccctgtacatcaccaaggtgaccaccatccacatgggcaattacacctgccatgcttccggccacgagcagctgttccagacccacgtcctgcaggtgaatggttagtaaatggctccatgcatgttgtcccctcatagcctccccaaactgctgctcagatcaaccctcgccccctcctgtattctgtcttcttaaagaaatatctaaccccaaaatatatcatctctcttataagtaaaggggaaccgtgtggaaagggcaaagtctgttgaccaattttcatatttggctccacccaaagcctccacaggtgaaacaaatccaagtgccatggcgtgagccattcaggccagtcacgctcagcagctggggctgccacagacagtgtggagcatggagcatgccccttaggcaacacagtgctggtgagccgctgtggcctctgggtctagtgcgagcagaaactgaaatccaccactccttccaggtggtatggaaccatatcacttgttcaattaggaggctctatttcctccgacaagggcttgtgtccgtctccctccccaggaggcccaatgagcctcatcttagccaagccaggacagaaactgaggcttggaagcttttccttgattctcacaggccctgtgttgccaggagtcccagaaactgaagaattcactgcctcctgatgacagtagccagggttttcccagcacttgccttggtcagtccctgtactcagcccttcacatggaccttcccatccacgtatcttaatccagttcatggatgatttgctaaaaaaggtcacttgcctggggtcacacaactgctgggtgttgctctggatccagaccccatactctgacctctaggtcacactgctggctgcctcaacctcgtctgatgaaatagaatatgtatataatgcttgggaaatgcctggcagaggatgtagttcacagtccaaggtagggtagatacgggggtgattgttggtgtaactcaagccaaatttagctatatttggtggacacagatggtcagagctggtggcccctcagagagcctccttcccattatacagtttggaaaatcaagacccagagaaaacgttcaagccaagaatagaatataggctgcttctccctggagctgccacactgccagcagtggggtcaagattccatgcacaggcggggccaccaccttctgggacttccccttccatgactctgccctgatttggttgactaaagaaaccattccagcaactacttcctctctcaaattattagtataacttgcccatagcccagacctcccagagatgcggcccgagcactgacgtgatttataactttgggtaaacctcttgcattgctttcataggaaggaaaaagaaatcagacataaatgattaatccattaaattaaaaacacccttgacctccccacagttcagacaagtagcgattcattcccaaaaacacaataataacctcctgaatctgtttattactcccgcatgctactttcgtgactgtgcctcttaaggatctatttacgctgcctttcacattgggaatggtcggtgtttcccaaagacagcgggcctttgtgttatggatgcaaatattttcacttgaagattttcaaatttaagagaaaatgaggccggtgtgctggctcacgcctataatcacagcactttgggaggttgaggctggatcgcttgagtccaggagttcgaacccagcctggccaacatggtgaaaccctgtctctacaaaaaatgcaaaaattagccatgtgtggtggcacgtgcctgtaatcccagctacttgggaggctgaggcatgagaattgcttgaaccggagaggtgaagtttgcaatgagctgagatagcactgctgcactccaacctgggcgacagagggagactctatctcaaagaaaaaagaaaatgaatgtgtgtgcctaggatatattaatttcacattatttttaatgtgtggattaacacaaaagcaaaagaggatatcagggccaaaggaaagagttgggtctctgccacattgctggcagagagcttggtctccacctttcctggcagggccccaggaacttcacacacccacgtagaccctccctgtccacactgctccatcctcctggtgggaggctggatccagagctctggcacgggtaggagctgcccagagctggctctaactttgagtatggacaacacttcagggtgttttcaaggagaaaaatggggcatagttgagagagaaactgggataaagagaagggtttttttttttttccaaggtaggagaaataaaagcattctgtgggctaacaggaaaaatccagtagaaaaggggaccaggatgcaggagtgagaggcgtgggagctatgtccgagctggggtggtgtctaggtaggaggtgggtgtgacatgagaatgatctagaagtggcaacgtgggcccaggaggacgcctaccccacctcccaccctagtggtaccaagagaaggggccgcccctgaagccactgcaggagaagctgcgtcctcaggaggaagccaggtttccactagagcaagaaggtgaaggagtgctcatagaagagtctgaggatgtgggagatgttgctaatgacagaacatgagttccagaaggcacgacagaaggttctggggaggagggatgccccagaggcctaggcttctagtggagattggcatgatctgggataaggcgcaggaggagaagaggcctagtgatccccagtagagagttggggcaaaactggggagacacaggggcaccggaggtggagcaggcagatctgaggccccctctttagtcctgctgaagggctggaggccagtgaggagtcatcttacccgctttggctcaaaaaaacctcaagaccagcagagggtgcatctcactctaagcacatgtgagccatctttttgcccctgctaatggagacccaggtgtcttgcatttagtcatgtatttttaagggaatgattcattccacacccttgacttgcaggcaggtttcattttgttctagaacactggcatgcacttcggttcaaaattagccctgaattggtctgggagagcttccaagtcaccactgactcagggtctcccttggaacctgttaggtaaatgcacatcctccagccccatctcagatcttaggaatcagacgctgggggtgagcccagcatcgtgctttaccaggctcccccgacctgcccctatgcgattcatgtgggtctgcaggattcctatcagaggccagggctgaggcacaggccagtgtccagccctggtgctggccacctcactgaggggccggtgtaccacccaccatacagaggcaagctcattccttgagtttccagttcactggacaagcccaccgccagtaaaaggacaggcaccatagacatcaggaagcacttcctgggtgaagtgagagggtggagtctgttccctattctgacaattttctgggaccactgtccctgtgctcccaaagctccctctggaagtgactgtctcactcatggttcattcttgaatcacttcccccagacagaaagctccatgagggtagggcctgaggctatctccccacttctatgtgtgacattgcctgacacttggctggcatttagtaaactttggctgcacagtattgaattgacagctttgtaaaatgcatcaagatcattaaggcggtgccacactcagaacgccctcagctcttcctcagtcctctctccctgcaccccactttgcaacatttggtattatctaactttgtaatatctgatatagcaaaatgacaatcactcccttttttcaaaatttcctcagctgttcttggatattttttcttctaaattcagaattgttttgtcaagccctgaccaactgattttttttttttaagacaaggtctccctcagttgcccaggttggagtgcaatagcatgatctaggctcactgcagcctcaactttccaggctcaagcaatcctcccatctcagcctcccaagtagctgggattacaggcgcatgccaccatatctggctaattttttgtatttttggtagaatcagggtttcacaacgttgcccaggctggtctcaaactcctggactcgagcgatccgcccacctcagcctcccaaagtgctgggattacagacatgagccacggtgcctggcacctaccaactgattttttaattggagttagattaaacatatggcttaattttgaatttgtttcctaacgatattaagtctttctatccaagagcatctctctccaattatccaagccttttttaatgtcatcagtgaggttatattgttttcttcattgagttccattatattttctgtctggccattgctggtgtataagcaagctgttaattttgtatattttagtactggcctcgttacgtaccaattaatccttataactttattggtgcattacctggatataactacatatgatttttctccatctttgtactatttgtgcctctcatttcttgccttccattgacaacatccagtgtgacattgggagtctggtattgcctctcttcctttgtcctttttcttttttcccaaattaatgtttcaccatttgaaaaagaatggtgtcgtttcttctttttatagagatattctgcattgcacgaagaaaatatcattctgttcctattttattgagggattttccccaagaaattgattttgaacttttttcaaaggcccttctagtgtctagcaagagaatcaaatggtttttctccttgactttggaatgattaatggtagatttcctaatagttagccattgaaacatattacccttgcccacagtatgttcttttaataccatgctagttttgacttgtccatattttacttagaattttggtgtatcacgtcctaagtgagatcagtgtgtagtcttttttgcattctctgccaggttttggtgtccaggttatgctaccttcatgatgtaatttggaacatcttccctgttccatgctctagggattattcattccttaaatgaatgaaggaattgtctgataaaacttgtcagagtgccttttgagttagtagtactttacagttgttttaaatattctctccttaactcaatgctggtacttccaagtttccttttttttatttttattattattatttgagagaggttcttgctctgtcacccaggctggagtgcagcggcacaatcatggctcactacagcctcaaccttccgggctcaagggatcctcccacctcagcctactgagtagctgggaccagaggtgtgtgccaccacacccggctaatgtttgtatgtttgatagaggtggggttttgccatgttgcccaggctagtctcgaacatgtgggctcaagggatctgcccacctcggcctcccaaagtgctgagataataggcatgagccaccgcacctggcctaaagtttccttttaaatgatccatttcactgagactttcacatttattaccaataattgaatacagcattctcatattttttaatcccttctgtgttctttttctatttttttattgatcaaacatcccaggaatttggctgttttgttggtttttacaaacagctcttagatttctttaccagttctgttcttcagctttctggttgattcattcatttatgcttctgtctccattgattcttcttctttctttaagtttattctgtggttgccaggcaggcttgtagaaatagacagtgatctagtaagaacccaagcttattaaccccaggtcctggccattcctattctagaactctggtggctctatgctaccaccttctccaaccacccccaaggccagtactcctggttctctctctgcgttactgaattccgaccaaaattctatctattcaaagggaaccccactcctccctctacccaaggcaaggtatagggaagtttctttctttcctctttgaatcaagcagggaagtttccttctttcctctttggatcaaacgggtcagagaagagagctacacatttatgttggaagcagtcctccagacatgcctccgctggagctccgtggacctcctccacccctagtggcctgacttgtgacaggcttttctgccactccctggcattctcccccagggcttcaaacaaagaaaaactgaggcaaggactctgactttattgttttgggtctctgtgtggtttggcattgggtgccctgagctcatgttattgaaacagctctggaccattggaggatgggattgtctccctaggcagttgtccatttagctttcacctctgcctccaactgtgtcccacagatcaagaaaagatttgaaattcagactgagttgatggaattatgagcagcccctgaggagctgtgacaggagctacagagttcatttctcacagggaggccgtggagtttttcttttatcctctgcccaccccacatgcatcacaaaaattctaccccactcaggtcccgggatccacaccattgccttttgtacataagtaccaatttgttctatgctctggttccaagaaaaatcttctctattctaaagtactgggatgctttctttaactgaacaacagggagttccagataactctaggaaaatgtagctgtccacttcaagaagaatccatctcccccatctccagggacagtgtgtttagtttagtttaatatgcaggtatgtttacatctcacaaatcttttttgaaagtgtgtaaagtaaaagttatagataaggaagaaccctcaattccactaaaaatgatacttatctcctggacccagagctaggggtaagagggagggtcctccagaccctcattgcttcttccaggcccctccccacagccaggctgggtaggaagggccagagctctgtggagggtgctggagccttgcccacccatgctcgtctggtgagtgggcaggctcacacccccaaccctgaacctgactgccagggcccatggctgagtcactccaagctgaggagggcacacctggcctttcacccatgttccaggggttgagaagtggagaaatgagaatggcccactggaaaatgaatgaacttccccagaacagaggccctgccagtcagtgccataagtgctttctgatacatttcctgcaagaaattaacccctatccaatggctttctgataacagaaagggaatgtatctaaattttattcagaaataaatttcagtggctgctgctctttacatgtagcagctgaacagcattaaatatttggatggccttctgatcgtatttagaataatgatgaaagccatgagtcatagggtacaaagtctgacatgtttattatctgcaatctattttatagccctttcttttagagcttgcgttgctggacaggattattataatttggttaaacacagaactccagtcacctacttgggttcaccccctctggagcagggtctcaggttgggccacaggcccaagtccaggtcagggccgtctctttctcaccagcactgactctcacccacagtgccgccagtcatccgtgtctatccagagagccaggcacaggagcctggagtggcagccagcctaagatgccatgctgagggcattcccatgcccagaatcacttggctgaaaaacggcgtggatgtctcaactcagatgtccaaacagctctcccttttaggtaagaactgcccttggtagacgtctatgcgatattcccattcaaatcaagctgagactccaggaatggaaatgagaggtataatttgtttataagtcagacaggttaggagtgaacagatggctcccaaatttccctgttatctgggctcacacagatcttttggggctttctgacagcaatgatgagaagctgtcactcaggtccagctcaccctcagtgcatttcagatgtgccagcccttcctgggcgtataatcagggctgctggctgcccaggggctgggcagccctaacactctcaatggccccataaaggaaagtgagtgggtctccagctgagcagtccaccctgagcactgtcctgtctgcagccaatgggagcgaactccacatcagcagtgttcggtatgaagacacaggggcatacacctgcattgccaaaaatgaagtgggtgtggatgaagatatctcctcgctcttcattgaagactcagctagaaagacccgtaagtcgacacgcgtttatgcttctcactgagctggctgggaggtgttgggtggcaagggagggcaccaattgaccagggccacagctgccaaccatgagcccgtgaagacaggggtaagcctcatatccctctttgcataaagctggaattggagggcacccagaggtgagcaggccttccctggcaacctagacaactctggaaacagacagggagattccctggacagcagacagagcccaggaacacaaggaaacccaaatagtcgagtcccagctctgctttttacttgctgtatgccctgaacctctgcccttcatccacgtgatgtcccacagtggcccagaacctgacctgtgcacacatgcacaccattgggagtgtggtagcctttacactaggggtccagcccatcggtgtgctaagcgtgctctcctcataaccactgctccccaggtaggcctgcaggtgtgatttcatagacatgggtgttaatcatggtcaaagactccaggctaagccattttcatcaaagtagataatcagaagtatttcacgtggtcatcttaggagaatcctagttgaaagtcacttctcctgctggttgtccaggaaatctgggagagatgttgcttactcttgatcatccatgaaatgtgagaaattccattagcttctgtggtcctagggcatgatttcaaagattcacttaagaatcaaagggtctggagacctgaaagcatttgttcatgtccagagcttcccccaagatactgttcctagggcaatgagtggtatagattctgtaagtgatggactaggtaccaggatcttcataaatggaatcactgcagtgacggtttaacactgctttcttctttttccttgactccatcacactcctgctttcctcattctctgctgctgcagttgcaaacatcctgtggcgagaggaaggtaccaagcttcattgttttgcgtcatgcctgtgatcacgtgtgtttggttctatgatgggccgtctttccatgatctgccaccagctttcccacacaaagcagccctatgggagcaggaagtcaatgtcaaattcaagtggcatatgcattgaatcaaatttaaaatgtactcctgtctttaatgagaaatttttaaatgcaaagctttcattaaaagtggcttgtaacctctgctgaagcagaacagttggtaagggttcctggtcagatctgggccttaaacttttttccagtagctgactggtgttgggtttagtgttttgcctatcttgtgtggttttaaaaagacaaaacaagttgtagatctctactagatagtcactgtaccttaaatatgctttgattgaggaaaacccgaggaaaaaagctgccatgatttctgccaatgtatatttttaaatgtatagatgtttagaaacatatttatcaagcaaatctttagtaagttgagccatatgaagttgccatttttgtgcatcaaagtggtctaagattgacaatttcatatggctgaaaatatagtgggcatgtgtgggagctggtggcagagcctgagtcactgtgtggggtgcaggtgcatgcccgggtcccagtccccactgtgtccccacaaccagatctgagtccaaatccccttgtggcaactcattctccagctcagtgggcagcagcaggaggtaccatgtgattgatgggttaagcacaaaatctccctctttgaaaaccaagacatttcccatctcattttttcctcaagaacttcacacggtgttacctgcagtctggcatatgcatgcagacacatactcagaacaatttcctgaacgtcaggaactaaagctgacatgataagtctgggaacaaaacaaaggcagagcccagaaaacgaggaactgctgtcaatagcaacagtcgctgatcacagcggccccttaggctctcacagctgctgaactagcagcatctaggctgagatgcacagtcactcaagtgtttaagaggtggtgttttccttaggggaggttactacaaagggtctcaagtttcagaagtagagacctaccaagaatgcaagaggccccatggaatgtgaaatcagctacaaagaccccagtgcccgctaaagacccacagccgccttggggcatagggttggtaggtatattgaacaattgagcagtgaacaaattcaatactgcctgggtagcttgtacccttcactcctgaaactcaaggtctggagatagggataaggagccaaaatgaagaggccagtaggcctcaggggacacacaagtctcaacaggagaaatgagaggagaacagacaaaagcaaaaacagctccttcgggccctcttagcagaagctacactcaggcagcttccagggagctggatcaggaggctgggtatcccgtgaagtcaattacttgttgaatgactgtttgttgagcctcatattccagggccgactgtgagcaaggccaaggtactgcactcagcccagaatgtagctacagccacaaaccccatgtgggctctattatgctttcaatcttatgttggttcttccaactaccgattttctaagcagacttgggaggctgttcctggagtttgtggcttagtggggactttgacccctctggcccctaggtttgcgtggaagcagtttgtcaggtgaaagagtacagaagagaagttcccgctgtgggtgagatagatggggtcagggcaggtgtgtgctggagtgctggctccaaacactgagatgctgtggagctaagactgactcttggcgggagctgagcttcatctggtttttgagaaacaggctgcccagcgcccctgattcccccgggattgcttatggagagctatgctggatactccctggtgttcacagcttctgagaggctgggttccagctgcttctggtggcaggagccctcctgcccagagcctgtctcagcacagacgctggaggcggctgaggtttatcatagagtcagccccttgttcaacagcaaggaccactcacattagtgcctctgggtgccaaggacccaaggcccagaaaactgcatgcagagttgttggaaaaaagtaaaacagtgattcctgttttgttgttttctaactcactaaaaacttgcccagatagtccattaaaccagcataccagttttctcagcatgctaaaaaaaaaaaaaaaaaaaaaaaaaaaaaaaaaaaactagaaaagagatttttctacatatttaccctagaatttacagagatcttaatgttctagatttaaaagaaatgaagaaaggaagggaaaggggagatagaaataaggagacagagtcgggaggagacagaaagacagggagagggaaggagcactctagagcttacatctccttgtaccttgttccccctttatagagacagaatgagggacagaggccagaatgcagggcccagggtctagctccagctctggcacagagacgggtggcctcagacaagtccctttccctccttggacctcagtttgtctttaaaataaggaggctgagctagctggtccccaaggccccttctcagctggtttgcttagaccttctccccagacagctacagccctgggccggggtcaggggggcatgactggagtgtaggttctgctgcctggcacgggctgccagagaaacggtggggggcggtgggggggcagggaacagaagtaagagcaagctgtctggaaagaggggttggccagcacagccaggacagagtttgggcaaagggcagcattcttagactccacattccaggaagtgacactgtacatacatgggtttaaaaaagcaaatgaaagcctttgctactttggcatccactgatccatcctgatgtgactagtatattataaacaatcaagggaggctttccctttcagaacaggaaaggtcaaatgtacatcaaagccaaggcttttatctgaaaacctgtggccaactctagatgacttagggcagctgtacgtagcctgtgacatgctttactgattcatagtcctggggggccctctctgcacccatccagctacaagctggctgctcattctaccccaccctgaccaggaattgcatctcgtgcctgcaccagatgcatccacgtggccggtttcttgtgtgttcaatgctgcgtgtgaccctgcccaggggccgactgcttggagggcatgcccattccatttgctcctcccaggcctcagcgtgggaaacatgttctatgtcttctccgacgacggtatcatcgtcatccatcctgtggactgtgagatccagaggcacctcaaacccacggaaaagattttcatgagctatgtaagtaactgtgcctggggcagcttctacatcatacacaggcaaaatcctaaaagtctatctttaaccaggcatgccatttgatttctaaaattccatttgctatatgtggtgtggttccaaattttttcccaggctaagagaggaatagatgaggctgagaatttaaaattctcattccttcatccagaagccacttctctgcactgagcctcaggtgaggcccaggtggtacaaatgggtttctggcctccagaaattcacagtcaaacgatggagacagcaatgtgaacagacagctgccaaacatgtgttttctcagtagccttcaggaaactaaggccaggtagaaaataacgatggaacattcagtgggcagaggcaggagcatgattgctgatagaggatccaggaaagcccttccaggatagccttaggaggcctcccccagggctgtggcccccacaccaggcctctgttcctctggcttgtttcccacttggccttgcaggataccctgcgctccttgaggacaggactatagtgttgaatcccaaagggtcatgtcaatgccccatatgccttccccttgaggatacagtgtgtcctcagttgtacagaatgaaataactgtgcacaattcactcagtgaatagttacgggcttggagcccatggaggaagtgggcttggcccaggcaagttcctaaagcattgctgtgctagctattggtatatctcaggctgttccatttctctcatttgtggctttgggaaaagctgttttccaggctgtttcatttgagttatttcattattttttagaagtgttatttcccatcaatgttccttccatatattaataacagctatgaagccagttagaaagagttccagcaattaggtttaaataattgcactccatcacattggcacaaatttctcatatatttgtagtaacctaacctgtaacttggagggactctctcaaatcctaaccgggattcagttttcctggataagaagctagacacaagacacagagaggtcctgaaggtgtttcaggcaatataagactgtggtgagctggggaatgatcccaaagaacgattttccatctagaaaatgctcaaacacctaacgagaattacaatgggacaagcctcttcctgaagggctggtgagtaggagattggggcatcccacgtcaggcctctctgctggcttagatgtctactttttccagaaggaggcagcgtgatgtcacagataaaggcatagccttcagagtcaggtagacttgggttcaaatcccacctctgtagactaagtagctttagaaaagttacctagcctctctaagctgcagttgtctcataggcaagttgggattatataaggattaaatatgagaacaagagtaaaaggagagagactagtttcaaagctattgcagtcacctaggagagaatggggggtggcatgagagaaccaagcaggagctggagaaggttctgagataaagacagatctgggtgccattagcatgtgagtgttggccaaatgggacagacaagggcatgtgcaagtgatttgagatgggtatctggaacagaaccctggagtcaccaacagttcagggacaggcagactaagaggaaccacaaagaagattcagacagagttgggccacaatcgcaaggaaaaccatgagactgtatatcatgtaagacaaaggaaaagaaggtccccttttacactcatttattctgtcagcaaatacattttaagcactgactctgtgccaggcactgtactaggtgctaatcatatagcagtgaaccaaagacctgccctcaaggaacttacttacaatctagtgaaggaggaaaggctgtgcccaggtagacaaatgaatgcagaaagtcaagtggtaaatggaaaatgcagctggtaagagagtaagggtacaaggagagctgagatagacgaggtcagagaagacctcccaataaggtgatactaagcagagacctgaaggaaatgagaaaataaaccctgtagatatctggggaagaacattccaagcaaaaggaacagccaaggcaaaggccctggtgcaggagagcggcgtgattgaggagtgctgagcacgcccatggcatggagtagggtgggtaagagagaaaagcagcagaccgaatgtagagggccttgtaggaaagacttgggattttattctgaacaagaaataatgttattgggagtgagggggaattgagaaagaggagtcacatgatctgacttgaattttacagtgatccctgtggccgctgggtcaagaacaggttgggaggctagggtggaatccaggagcatacacggatgctatagcagtcacctaagtggcaggtagtgtgacctggccagggtgatggagcagaaatggtcagagcctatttctggatatattgtgaaggtaaatctgaaatgacttgtgagacattggatggggcctgaggttagaggcatcaaggatggcctcacttcactagattgtaaggttttggcctatggaagtaaaacagcagacttgccaggttttcagtagaatgagcaggattaagaagtaaaatcaagagttgattttgaacaaccaagtggagctaggcagttggttattgaagtctagagttcggggaagaggcctgggctaaaggtatgaattgggagttgtgagcacatagaatgtatttaaagccataggtttcaatgagattaacaagggggtggattttagagaagaaacttaggcgtgaaccctggacaccctagcatatagagatcagcacactgagcagagtccagcaacagaggatcagccgccgagggaggatggaggggagggaacagagggagtcaacacaggtttaatgtaataagtggggagtccatgttgaccttggggagaacaacgtcagctctgaggactagagccagagtgttaaggagcatgcaagaggtgggaagtggagaaggagtataggcaactctttcagaagtttggccatgaacagaagtttttaaaatgaagatgaggagagggagaagatagcgtaagaatagaagaacatgaacctggaagctgctaactgagcgggtgcaaagggagttttagccccaaaagattaaaggaatgttaagtgagaagtcagtgatgttggagggcttgggtgccctgttctatggatccaaaggattctaagagagaggaagaaaggcacagaggagggtcaggggagagagtacctagagatgttggagggaaagggcaattaagaagatatatgacagcctatctcctttgcaggaagaaatctgtcctcaaagagaaaaaaatgcaacccagccctgccagtgggtatctgcagtcaatgtccggaaccggtacatctatgtggcccagccagcactgagcagagtccttgtggtcgacatccaagcccagaaagtcctacaggtacacctctttaatggagtgaggaaaacttcaaattctggggcacagcctgccacattcttctttgctttctgcatactccccagctcctgtgccaggtggtcagactgaagggagaaaagattcatgtgtaattattcgtgaagtattgattgtctactatgtagggaaacagccatgaatgagcaataatttccctagaactcatattctagttggggaccataaatcagaattttagagaactataagtaataaggactatgaaaaaccaggttccaagcaaaagaggaacaggaagactattttcaattggccttttccctcaaggtgaatgagatgccaggtaggaccgagactctgagagaaggcacagtgatgaagggtagagtgggaggatgaagtcaggccaagcaagggcccactcacacagggcctcggaggccagtcaggagctaaaacaaagcccaaagtgaggacatttcagtgagaaagtcacagaagggctttcatcaggggattgatccaatctgacttagatctttaaagaatcaacctggtggttgtgttaacaaacgggctgggtgtggtggctcacacctataatcccagcactttgggaggctgaggtgggtggatcacctaaggtcaggagtttgagaccagcctggccaatgtggtgaaaccccgtctctactaaaaatacaaaaaaattagccaggcgtggtggcaggtgcctgtaatcccagctactcaggaggctgaggcaggagaatcacttgacgggaggccgaggcaggagaatcacttgacgggaggccgaggcaggagaatcacttcaacccgggaggtggaggttgcagtgagccgagatcacaccactgcactccagcctgggcagcagagcaacactctgtctcaaaagaacaggaagatggagcagggatctggtctgatgtaatccaggcaagagatgacaacagcagtgggagtggtgaaaaaggatcagtttcttgacatattttaaacatgaagcctgaaagactttctgatagattctttctgacagattgaatataaggcttgaggtaaaaaggatttaagttgtcttttaacttaagcaactatagaagggtgataccatttacaatgtgtggtaggctaaataatagcccccaagatgtctacatcctaatccacagaacctgtggatgtcgccttatatagcaaaagggactttgcagatgtgtttcaattaaggatttttaaatgagattatcctggattacctggatgggccctaaatgcaatcacaaatgtccttataagagggaggcaaagaaaaatttgactgcaaagatgaaaaaggcaatgtgagaactgaaacaagatgctgaattgctgtctttgaagatgggatgaaggggccagaagccaagggatacaagaaatgcagctctggagactggaaaaaggcatggaaccatactctcccctagaacctctagaaggagtgctggtttcaattgattttggctttctggtctccagaactgtaagagaataaatgtgttgttttaagccatcaaatctctaataattggttactacagcaatatgaaactaatgcactacaagagaagagacttcaggcaaggcagggagcagattggggggtgatttaagtttaaaatactgttagaagagaagagacttcgggcaaggcagggagcagattggggggtgatttaagtttaaaatactgttagatgtgtaagtagagaagtcaagtaagcagttagataaacaggtctggagtcaaaggagaggcctaagctagagatatcgatttgggtatcgtcaccatatgaactgtattaatccaggaaactggatgaaattaccaagaggtggtatagacagagaagaggtcaagattggagtcctgaagcactccaacatttaaagatcagtaaggagagaagaaaccaataaaggagaccaaggaggaataacctgaaagataggaaaaaattaggataaagagagatattcttgaagctaaaagaagagtgtgtttcaagggagttgtgctgtgatgagcatgtgtatgttatgaagactgaggactgaccattggatttggtacaatagagtcatggatcaccttggcaggaacagataggataatggtggaatgcaagcctgctggagtggattcaagttagaatcgtaggtgaggaaatggagatggtgaatacaggcaatcatatggaagggttttgctgtaaaggtgagtaaatgtaaagaaatgaggcaatgcctggaagggaatgacaaaagaactttttaaagtaggtgacattacagcactatatgctactgagaataactactcccacaattcttctctttctctcctgcatcctcatcctgcattgactctaggcaggagtcaatgaaatccaaagcacacaagtggagatctagccccagataaaatcacatcctttcattataacaggaggaagtggaatatcttacatccaggcacaagtacaataggtgatgcaatgggtggtagttagatgaacttctttttgagttgttttttctcagtcaagcctggaggtttgaagagagaggtaaaagttcaacatgagactgaactggccaggcaaatctgataggactgctgggcaacaatgagggcccacttaagaattgtgggtataaatttaaagtgagaccagagttggatctcttcaacaatgctcagtttccccagtaaaggcttgttatatgaagaaagttggaaatagccagggtcgtgtttctcttggcaaatacaatgggacatgttccaactgcctctttgttattgattcccctggccagagaacatactctgaataatatcgatcctttgagatttattgaagcttgttttatgactgagtttatgaccaattttggtaaatgttccatgtgtactttaaaagaatgtgcattctgatgttagatactgtattctatatatgtgtcaattatgtctacttggttcattgtattgttcagatctatccttggtgattttcttgtctgcttagtccatcagctgcagagaggtgtgttaacatcttccactatatttcgcaaagttctactcatttttgctttaaaattatatcattttccttttattcttacaaaatatccctctttatctctggtaatgctgcttgcctgaaaatctattgtctaacactagtatagctaaatcagatttattttaattcgttttctcatggtataattgttccctccttttaactttcaacctttctatgtcattatatttaaggtcctcttttataaagccacgtgtagttgggtttttatctaatttaatcatcttagtcttttacttggagtatttgatacatttatgtttaacataattaattatatagttgatttttatctactatgttacttttgttatttgacctacctgtttatgttgcttttttctcctttttgctttcttgtggatttgccaaacattttaattattctgttgttgacgatgcactcttttatgttgttaacataatagtgattataacatgcatcattgcatcaatacagtctcatacaaattgttacttaatatccccaataatgctagaaccataaaacacttcaactccttcaaccctcctcccccttacttttgcattgttgtggtaatgaattttatctgtatatgtaatttaaccccacaggacattaatttatattcacccacacatttgccattaattcctgaatagttctaacaccaactttgcttgaagatctgttggaaacagattctcacagtttttcttttcaaatatctttactttactttgtatttctcaggccaggcacggtggctcatgcctgtaatcccagcactctgggaggccagggcaggtggatcacctgaggtcaggagttcgagaccagtctgaccaacatggtgaagccctgtctgtactaaaaatacaaaaattagctgggcgtggtggtgcaggcctataatcccagctacttgggaggctgaaacaggagaatcacttgaacctgggaggcagagattgcagtgagccaagattgcaccagcctgggtgacaaagggagactccgtctcaaaaaaaaaaaaaaaaatctttactttctattcttcactgagtatagaattctatgttagcgattcttttctttcagcattttaaggtatcatttcattatcttcagttatttttgctgatagtcttattgttgctattttgaaggtgctgtatcatttttctctactttccagatttttctccgtgatctttagcagtttattatgtgtgtgcatatggcattctttgtattatgatttgggatttacaaagaatatgtgtatttcttgaatatgtatactgatatctttcaaaagattgaaaaaaaatgtcagccactattttttcatatattctgctgcctcgttctctctcacctcttctttgggaactctgtttaaaaaaaaaagttaggactttccattctttccattgggtctcacatgtctctttctgcttcaatttggatatgttctatcaacctatcttctgtttctaataaaccttttaatggcaaacactctatatagaagattacactttcctctgctaggcaaagagagtagagactgagttgaagcttctgtagggctcagcctgcctctgatttgcccctaatcctggggcttgtttgccaggatcagatctcttggctgccatagccttgctgctcagcacattgagactgtgaaaaattctgtcctcaatttaaatgatttttggcttaagttctctggactcctgctccataccaccttagaataagagtatgaaatccaatgggagaaggttaagcagaaaggagagagaacagctaaagtccaaacttgagggaagtttaacaggatagctggaggagaatgtgttgtcaagatggtatcattactgatgggttaggaagctctcagtagaggaagacagtgtcaggtgctaaagcctttggtgaatgaagagaaactggcaggaacaaatacaggtagctggaggctacaaaggcctcggggtatgtaaagtctagaaaataaaaagcagcctctacttaaggctcaggggacaagagtttttaattaaagcaagagagtaattaaagcaagagagtaaagggagacttcaaagatggtgatgagtggagaagagatatatttcagcagggtgggaaaaatcaagagttcaattctctatacgttaggttgagatcatcaacagatgaatgaattctagagtcatcagagtatagagggttattagaagccatggcattccagtgaaagagagaagacagtcaaagatgaagtcagaatgaagaggagaagccagggaggcgggaggccacgtgaggtaaggaagggtatgtaagggtttaatcatgtggaatcttactgaaatgtcaaataggattacagaatggtctctgaattcggcacgaattcagaaacttggtgaaagtgagttaaggagaaatgcttacttctttagaaaagttttgaccagtggaggcagagatgatgcagtttttctccccctcatcggagagactagaatactagaatatgagtgggtgaaataaaacaaagtataaggtggctgaggtggggaggaggaaaagatcattgaaaccaagaaggaactaagaaaaggagggctttggatgactcttccatgtggattgaaggcaccaaacttagtgaccaagtgagtagtagagaggaagacagcaaagggaggactagaatgttgaccagtgacaagaagaagagcagggggccatagtctagtggcatgagcattatagaacagagtttttgagcttgtaatctataagaagtagaaaacagctttcatttgacagggccataggagaagctatatcatcaggggatagcagtactgcagttaaaaaagagcacgtctgctgatgccatagtctgagacccagaggcgccagtcaaaggctgtgcaagatagaaactgcccagagtagaacaaagatagatagagaggggtgataatggatgatctcaaagtccacctcagatgacctaggaggaaggaccaactcaccagaatctaggccacagagtagtctagggaaggatgctgagggtccaagactttcaggaagaacgaaggaaccctggagctggttcctgagtgaaaaacttagcctctgtgttcagacttttgccatgttggtctaggtccctttaagtaacatgcaggaaaataaggaacattattgaccactaattttatgcctctgggccgggcacagtggctcacacctgtaatcccagcactttgggaggctgaggtgggcggatcacctgaggtcgggagtttgagaccagcctgaccgacatggagaaatcccatctctactaaaaatacaaagttagcagggcgtggtgtgtatgcctgtaatcccagctactcgggaggctgaggcaggagaatctcttgagcctgggaggcggaggttgcagtgagccgagatcacatcattgcactccagcctgggcaacaagagcaagactccgtctcaaaaattaataataataataataataataataataatgcctctgagaaaaaagacagaggggaagcttctgccctgggttcccaaatggaaccattggcaaggcttctagactggctttcccctcgcccaggagtgatgcccatgcatacaacgcccagaaatgaccatcatgtcagctttcacaacatgtcactattttttttcaagtccataggtgtggaccctctgccggctaagctgtcctatgacaagtcacatgaccaagtgtgggtcctgagctggggggacgtgcacaagtcccgaccaagtctccaggtatgttgagcacatggaggctgatacccacactccactgagagaagaactctctccctataaaataagtatctcctgcttccccgggtagctaattacatttatccaaaatatatccataaaggctcaaggagagagtaggaaacagcctcaggccaatgcccctcacaggcaattgatgacagcaataatgatgatgaataggattctgacatcacaacaatcagaatgtggcacccaatccccatccagccccacaatcctgcctctcttgagccaatagctcctgggtcccaacagaatgaggctctggggtccagaagggaggctgaagaatagtgtcaaagcaagcagcagatgttagccaatgaagaaggagaagcagcagcaattatatctgtaaacaaaagcccacttaccaagtgcttacagtgtgctaggttacagaaaatttccataatttgcctatagtccaccctagacagtgtggctctggagcccaaacatctagcactcccttgggtagagcttgggctccagagatccgtgggatcccttcccccatcagccaagaaaggtcaatagcaaccctgacttgagcaatttgagtatgccctgcccagccttgcccatcagggatccataagaggaatgagccctgtaaagtgatttgaatgcccattttctcaattctcccaaagatggtgcaaagaaccattctgggtgcacaggagaaaagttaattcattacatataatggatgcctctggagattagggtctctctctctctctctcagaacccaaggtgagaagggctgcaaatggagctaactcccctgtagaaccctctggaaccaagactggcaagagggcagaaagaccagggtctggagaagcttccttctagggactgaccacctacctgcacctctgcatcactcacaacttcagtttctatactctgaggccactgtcacactggggaagccaccaaccattcttgggtccagtgaggtgacaaaaaatagtaataacctatcagagagcctggacaccacaataaaggccactcagaacagagtaccagcccaaagaaatacagctgccagaaataccaacaaaaaataagaaagcacttcagaaaattcaagaggaggggccactagaaaaagaacaaaaaagatttcccagtttaaaactgcaatagatgaaaaatgtgaacaggcacagtggctcacgcctgtaatcccagcactttgggaggccaaggtgggcagatcacctgaggtcaggcatttgaaaccagcctggccaacatagtgaaaccccgtctctactaaaaataccaaacttagccagacgtgatggtgcacagctgtagtcccagctactcaggagcaaggagaatcgcctgaaccctggaggcagaggttgtagtgagccacgatggaaccactgcactccagcctgggcagcagagcaagactctgtctcaaaaaacaaaaaaagaaaaatgcatggtttctactgagacccaaaatagtagtctgaaagataaagaacaagaaaagctctctcaaatcacagagcaaacccatgaagaggttgagccgtgaagtgggaagaacagaagtttagaaagaaaagataactattagaacggagtcaaacattaaataagtttccaataaaatattcaagttgaagaaacttaatcctgtagattaaaaggaatctacaagtccaggctaaactgatgagaaatgacacatctcttcactagtgataaagttccagcactccaagttttaagaaaaactaatcaaattgacagtggacttctcacctgcaataggagctggaagaccgtggtatcccatctacacgctccaagggttctattcccaagcaagacatcatttacctgtcaggacaaaagaaagatatacgggtacgcaggaactcagggagcccatcactcatgggccacacctaaggaaagatactagacaaacatcagatgagccagattagagacatcaaggtggacagagatagtggcaagtaatgaaccaggagaggaagatctaaaattaaaagtaaaatggatgaggagaggctatctagaaatgtacaataagtgccaggtgaggacatttgaatgaggagagagacaatgaaagaaattctgataccaagctgtaactaaagataaattgtttcagtaaaaagagtaggagccaggtgcagtggctcttacctgcaatcctagcactttgggaggctgaggcaggaggattacttgagctcaggagtcggagaccagcaggagcaacctaggaaaaccgcatctctacaaaaaataaaataaaaaaattagccaggtgtgctgacgcacctgtagtcctagctacttgataggctgagacaggagaatcaatcacttgagcctagaaggtggaggctgcagtgagccgagatcatgccactgcactccagcctgggtgacagagtgagaccctgtttcaaaaaataaacaaaagtagggagtatgcagaaagggggagtaaaaatactcaaaacttcactttaaacctcattttattgggataagagaggatacagagaatgttgtttgaaattggtagttgagaagtgaatatctcgtatcaaatatgactgaattccccaattaaaagcagagatgagcagactgggtttaaaaactagcaataacttttttccaagaaacacacataaagtgataataaaaggttgcccttaaaggggtgagaatagtgatgacaggtgaacaaaaaagcatgcatgcatggtagcgtcaggcaatgtggaatttagggttaagagcactaagcatgttgagagacagtaggtgctgaacagctgatctatatcaaacaaacaacgtaacgaatacgtaaaacaagagtgattaacatagaagagcttgatttaaaatatacgaagagacaagatgacaggaaaattgaatataaacaagaagtttggtttaataaaaacatagaaagcctttcatcagtcaaatagaattttttagtatgtctccatataaaaaagtatatcactaaagaaactttaaatttttgtaaaagtagatgttgtaggctatattttctgataattaagaaaacattcctggatatatctattggatcaaagaggaaattaaaaggaaaactaccaatggtctcaaaagcaaagaaaaagagactattatttcatatcaaaatttacaggatacagagaaagctgtaccaaggaattcttggggcttaaaagcctgaaaaggaagtatttaagaaattgaaagagaacaaaacttgcaagaaagaatagagactaaaattaatagaaagcaaaacaaaaaagatgaatccttcacaaccccaataaagaaaaaagcaaacaaaaatagacaaaatgaggaatgagaaagggaattttattccagatacaggaggatgaaaagacttgaaaaataggccaggcgcagtggttcatgcctataatcccagcactttgggaggccgaggtggatgaatcacctgaggtcaggagttcaagaccatcctggccaacatggtgaaaccctgtctctactaaaaatacaaaaattagctgggtgtggtggtgcacatctgtaatcccagcgactcaggaggctgaggcaggagaatcgcttgaacccaggaggtggaggtggaggttgcagtgagccgagatcgtgtcactgcattccagcctgggtgacagaatgagattttatctcaaaaaataaataacactacattgcaactctgaggcaacaaattttagaacctagaggaaatgagtgaatgcttgcaaaatgttttaaaaaaattaactgactgacttatgaaaagagaaacttgagctagagcaattaccatggattttttaaagaaaaatctaccatagaaaaatgtacagctgagttttgtcaagtcctcaaaatatagataattttacttgaactatcccaagactatagggtgaaaatgcacagtttgttttaaatagccagtgttattgtgattataaaacctgatttaaaatagtataaaaaataaaactgtagactaatctcacttataaatacagaggcagaattctgtttttaattctaacatactattaaaaatagagtccaggatgaaaactcaaacatgttttgtggggttgcgctagtttgtgctcggggtgtctgactccgactcatttcctaattcttactggattccaaagctttgaggatattttttaagacattctggcttatgacccttagtagtacaaggatttgtctggctttgaatttcatgggctcagtgattgattacaaacaaagagatgcaaactaccactgtttacatagttttacggtgtttctaaagattttatattgaaacttaatgtttagattcactgagctcctaaagaaaatagaatataaagttttgtttgggaaaagctgacttgttaaattctttttaattgaattcaaattaaagcgcattgaaaccacatggcttatgatttttttaaatgaataaattgtgaagaattggttttggttacaggaatgactggaatccaagagatgacttggacccatgtccttgtctaacatacaaatccaggaatattatgcaaggataatttattttaaaaagggagtttcacaggagagacgcatgtgtataaacaaacactacacacacacacacacacacgcaaagaaaaagacatagaatccaggaatgtgtctaaatgctcaagcagggaacacattcccaggatgcaacgatggttcactgtcaggaaatcagtctatattattcataacaccaacaaattgaaagagaaaacatgtaggacgttttcaataaatactgaaaagacatttaattaaatacagcaggcattcttaataaaaagcctaaacataggaatagaaggaaattctttaaatataataaagactacttctccaaaaccaataaccaatagtttacctttgcctaaatggcaaaacactgaaagcataataccaggaattacagcatgatgcttcccttctcataactggaaagtctaggatatgcattatcacaaaaaaaaagtatgaaatcatttgaataaacctaccttcatcactgtgggctaggattaaagaaaccattgctcacaaaaactgctcctggaaattcaactggcatagtctttgtggtgagccattgggaagtgttaaccaaaagcctgaaagatttttttttttttttttttgagacagaatctcactctgcacccaggctggagtgcagtggcacaatcttggctcactgcaacctcctcttcccgggttcaaacaaacaattctcgtgcctcagtctcctgagtagctgggattacaggtacatgccattacacccagctaatttttgtattttttgtagagatggggtttcaccatgttggccaggctggtctcaaactcctgacctcaagtgatctgcccgcctcagcttcccaaagtactgggattacaggtgtgagccaccatgcctggccagtgaaagagtaatttttgatccagcaacttgacttctcagaatttttccaaaggccataatcatggatgtggacaaaaattgagctatgacattatttttaatctctcacaaatacaatgtttgttactgcattgtttgtatttgcaagagattaaaaataatatcctaatattgtttctaaatatccaacactgaaggatttgttgaacacactttgggaagactacatgaacgtgtttgtacaaatgaggctccctccaccaaagccgccctcagcacccaggtttggaaggtttggcatcttttccaatgctgcccagcactctctggcccaccccctttctcaggccagcttttagctgcctcccagcctgtcctctggataccatgttctctcccacccctccacatgccacttcccagctggcttcatacacccctctgagggagatgcccagccttgctgtccccaccctgccaactgatgggcatatcctgagattcagacacatacatgcatctcctgtaccaagcccatacggcagcaaatgtgaggggcttgacagttatctttagggcactgtgggcccagctgtgtgtcaggacacaagaaaaagccgaggaggaactcgtgactcagagaaacgaggctgacatgcccacatcagttcaatggcccatggcactgcgttttgatgaagtaacctctgaatctagggtgtcagagcagtgaagcgtgaatgacattgaccaatgacagcctgtaattttccatctctactatgagctaaaatgacaggcctgataccaagcaatgattgcatggcttcttggaattccctggcattttcttttcagactctctaagatccagtttcctaacgctgatattttcttaacacccacttctatgagttttttcctatgagcttaccatagaagtaatcatttggcctcttaaaaaaaatcacagagaaataacctaatgcaacatgaggactgcctcaaacctgaaaatcatggcttgcatcactccagcccagcactctgcctgctgactgcagaggaaagcaagacgaaaaaagacacaagcctccagcctgcctgaggaggcaggccaggtgctgtttgttttgtcataaaagtaaaagccagaaggcagctccattcctaaaaagtagaagcatccagagctctcagccatgggagtcacaagcccccaccagagtcagctctcaccctgcaggccaagcctcaggctgcagaaatctagaccctcctttctacacatgtggccacaatatcatgattagaaaaagtgtctcacattcccgttcaggggcccagcatctgcctcctctcctgcacagagggtctgggcttctcggggcctgtaagttggctaagcccctcatcggaccactggtctgctgctttctgggcagtggcctagaacttcaaggctgatgagcatatgcagaaggcaggaggacacagtctggctggcttgggcctcactagctgacagaggggctgcccagcctgaccacaggggtttcatggcagggactccagaccactcactcatcctatctgacttcacacaccacctggcttctgctcagagctgccattgtgccttccctgacatgagtgcagctgggacacacaccagggaaaggctcttgtctcctgccaagtccacaggggagaaagcgttacctccagggaaacagaggcagccgtgctctgtcactaccaatttgtacaaggcacagggcctaattgttgactttctacagcaagtctcctgtgtgagaccaggacctcttcccagcattctaaatgcaagacatctcaacagcccagcatgtcagagtggcatcccgtaggatgtctgctttctctcatcagtcctggagtcgcacctcagagaatgcctgtgagcagcatccgacagagactaccaacaaactggcccaggcatctggcaccagagaaaaatgaactcccagtagacagttccaccacgtgacattttcatgattgacagccctctcccactttccctagcctggcttacatgttgagaaggtaggattccccattacgagaggaggtggtctctgagcaaccacagtgatgtttccattctggagacttacttcccttggaaaccccaccaccacccctcaggttctcactctgccatcatggtggctgacaaagtgcagcaaggcaggcttaaccatggggcagaagcaattcgggcaatcagtcctgtcccaccacttcctctttcaggaagaatgggtccctgcctaggatgtgcctgaactgctcccactttgctcctgcctcttccctgagattgaggtttgttagtcatctctctcccaagcacccctctgccggggtgactccacctgagcgtacaggtgtctccaggttcagcccccacctgcatgggccctcactaggattcccactctgtgttgtaggtgatcacagaagccagcaccggccagagccagcacctcatccgcacaccctttgcaggagtggatgatttcttcattcccccaacaaacctcatcatcaaccacatcaggtgagactggcccatgatgcctctaaggcactccccgctccagctcagccctgcaaggggcagcattgcccagcatgggacctgctcatttctctgtctcctccactcccatgctggatttggaccccatcacgaaggaacagagaaggtccagtaaaacagacccagagcctagtcctcattgcttggggtcaataactctattatactgaaggcacccagctcctaatgccctcagtggcccagaaaggtcaggaagtcccatccttaaggtaaagacagcagaggaaagaaagaaacagtagcagtaaattgagcaccctctgcttgctagacacaaaaatctagtcccagtggtcttaacccctatgttatagatgaggatcagagaagttaagacactgaccaatgtcacacagctaggaactggcaaagtcagactaaatgtaaagccaagtcttgtttcagtgcaccattcttccacattcccatctaaccacagcccataatactttaggaacccccagagcatctgtgtggggagcccacaacgagacaaggcttcctgattgccatggtttgccactacctaaaacaaccacccaataataagagccatggcctcaactgcagacctcggcccagcatggtcagtccccatccgtattcacttcagagagcccccaatatcttctgtaaacttaccactgccagacgaccaagcctgtctctaagccatcaagaccccaaatgtcttgtagcactatttgtacctttctataatccgccatcaagcacctctctgcagaaagaaatgattcgtttttgcaagttgttgctggagatgcacccattcaccctcacccaaggaagaaagccactttatgaaccctcccactgcagagagagcctgtgcaagagcctctaagagtatattaaatgatgaagccctcataaagcagctgtattcagctgagggtcgggcacactcagaggttctgcagttcctgtgtgtggcttttaacttaaagtttcttataagagcagagttttctttcttgctatttccatgctctggttctttaaggatgctttaaagatgtgccttggagggagtattttcctctactctggggtacagtttttctagagaaaactacagaagagattctgctctattcctgcaggtgtacacagcaccaaaaggcctctgtgagcaagggatttaggcacaggctctcaagatcaaagggaagtcctgcctggagtcaggcttttccatacttccaaccagcctccaaagaggaattttagaaaatccagatttgagcaactcccacctacctgagtccctctgctaaagttccctcttagatcaaatcctcccaatagccctaggaaggagctaacctggttacagtcactgaggctcagagaggcaagcagcctgccccaggctctgcagctagcagggcagtgtgccggcaccaggccatctggctccggagggaaaagctgtcctcaaccccaatgcccagggttcttcctacccgcatcaccaatgtggtcagagaagagactgcccccacatgtttcccttccaggggaagagggtactaacaggacatctgcacttgttcagctgcatctgcatcctcaaattctaacttgccagttagtctagaaaacagcaaggatatagaactcttttcttatctttgtaacaggcagaatcggggcagggatctcttgcccttttcctccatgctcaccatccagacacagactctcccctttctagctggcatgggcctcagggaaacagttcataagtattataaatggagaagcagttgaagcgcctctcgccttcctccataatcatttccaacgatgagtgcatgttacaagagcataaatccaggaacatttgtaactccactgcgtttggattgagatcatagattatttgtttatgaagacatcccctgcagaatgatagatcttattactaggctattagatcactgaaggattataataaagggaaaaggcagaggatgtaattgtttaagacaaatgacagattccccacccctggaggcaacttctgacctcagttcttcccctcccaggtttggcttcatcttcaacaagtctgatcctgcagtccacaaggtggacctggaaacaatgatgcccctcaagaccatcggcctgcaccaccatggctgcgtgccccaggccatggcacacacccacctgggcggctacttcttcatccagtgccgacaggacagccccgcctctgctgcccgacagctgctcgttgacagtgtcacagactctgtgcttggccccaatggtgatgtaacaggcaccccacacacatcccccgacgggcgcttcatagtcagtgctgcagctgacagcccctggctgcacgtgcaggagatcacagtgcggggcgagatccagaccctgtatgacctgcaaataaactcgggcatctcagacttggccttccagcgctccttcactgaaagcaatcaatacaacatctacgcggctctgcacatggagccggacctgctgttcctggagctgtccacggggaaggtgggcatgctgaagaacttaaaggagccacccgcagggccagctcagccctgggggggtacccacagaatcatgagggacagtgggctgtttggacagtacctcctcacaccagcccgagagtcactgttcctcatcaatgggagacaaaacacgctgcggtgtgaggtgtcaggtataaagggggggaccacagtggtgtgggtgggtgaggtatgaagggcccagagcagagccctgggccaaggaacaccccctagtcctgacactgcagcctcaagcaggtacgctgtacatttttacagacaaaagcaaaaacctgtactcgctttgtggttcaacactggtctccttgcaagtttcctagtataaggtatgcgctgctaccaagattggggttttttcgttaggaagtatgatttatgccttgagctacgatgagaacatatgctgctgtgtaaagggatcatttctgtgccaagctgcacaccgagtgacctggggacatcatggaaccaagggatcctgctctccaagcagacacctctgtcagttgccttcacatagtcattgtcccttactgccagacccagccagactttgccctgacggagtggcccggaagcagaggccgaccaggagcaggggcctccctcccgaactgaaagcccatccgtcctcgcgtgggaccgcatcttctccctcgcagctgcttcttgcttttctttccatttgacttgctgtaagcctgagggagagccaacaagacttactgcatcttgggggatggggaaatcactcactttattttggaaatttttgattaaaaaaaaattttataatctcaaatgctagtaagcagaaagatgctctccgaggtccaactatatccttccctgccttaggccgagtctcgggggtggtcacaaccccacatcccacagccagaaagaacaatggtcatctgagaatactggccctgtcaactattgccaccctgcttctccaagagcagaccaggccacctcatccgtaaggactcggttctgtgttgggaccccaaaaaaccagaacaagttctgtgtgcctcctttcagcacagaagggagacatctcattagtcaggtctggtaccccagattcagggcagactgggcttgcctggcaaggtatgggtggcctccaggctcaatgcagaaaccccaaggacacgagtggggccaggtgagttcctgaagctataccttttcaaaacagattttgttttcctacctgtggcccatccactcctctctggtaccccatccccgcatcagcactgcagagagaacacatttcggcgagggttttcttacccacattccccaatcaatacacacacactgcagaacccagaacagaaggccacaggctggcactactgcattctccttatgtgtctcaggctgtggtgactctcacatgggcatcgaagaagtacaacccacatagccctctggagaccgcctagatcagagactcagcaaaaacaggctcgccttccctctcccacatatgagtggaacttacatgtgtcctggtttgaatgatcattttgcaagccacacgggttgggagaggtggtctcaccacagacgtctttgctaatttggccaccttcacctactgacatgaccaggattttcctttgccattaaggaatgaactctttcaaggagaggaaaccctagactctgtgtcactctcaacacacacagctcctttcactcctgcctgactgccaagccacctgcatcccccgccccagatctcatgagatcaatcacttgtatgtctcacgcaacttggtccaccaaacgcctgtcccctgcaactcctaggggtgcgcctagacaggtacgtctgttttttattttaaaagatatgctatgtagatataagttgaggaagctcacctcaaaagcctagaatgcagtttcacagtagctgggatgcatggatgacccatctcacccctttttttttcctgcctcaatatcttgatatgtttactcccaatctcccatttttaccactaaaattctccaactttcataaacttttttttggaaaaatttccattgtatcagcccctgacagaaaaaggatctctgagcctaaaggaggaaaagtcccaccaactaccagaccagaacacgagcccctctgggcagcaggattcctaagtcaaagaccagtttgacccaaactggccttttaaaataatcaggagtgacagagtcaacttctgcagcacctgcttctcccccactgtcccttccatcttggaatgtgtctaaaaaagcatagctgccctttgctgtcctcagagtgcatttcctggagacggcaggcttaggtctcactgacagcatgccagacacaactgaatcgaagcaggcctgaagcctaggtcagggtttcaggagtccagccccaggaggcaaagtcaccaatgcagggaggtaaatgccttttggcaggaaaaccaatagagttggttgggtggggagtcaggggtgggaggagaaggaggaagaggaggaaggccagactggcctgccctttctcccatacttcaccccagcagaggttcatgggacacagttggaaagccactgggaggaaatgcctcactacaggggggcctcctgtagcaagcccagccggtaatcctcctaatgaacccacaaggtcaattcacaactgatatcttagctattaaagaagtactgactttaccaaaagaatcatcaagaaagctatttatataaaccccctcagtcattttgaaataaaattaattttacaaaaattcgatagtttttttttcccaaaatgacaaaaaatctgcacctgtggtgacaggaaggctttgaaatagaggccctcattcttctgctccagtgggcagaaccttgcataaaggctccgggtccaaaagcccacccaggcagccccagacggatggcaggaagggggactgtcagcttcgggacgatggcacgacctgcctgcatgaggagggttgatgggcattgcacccacggccaaagctatcatcccagcctcaccaacactgacccagcccaccctgcctggggctggcccaggcttatttcttcagtctccaagtcattcgagtgtcctacttttccccaagctccaggaagaagctagaagagccctgtaaatcctggctggagccaactactaataccaaacttcaggtactttgacctagagatagcatcaccagagacagaaactcaacccctacaattcccacccccaacccagacatctccccatctccatctgtccagacaaggctccccattccaggtaggcactggaagccggctttcaaccccaaataaaggagagaacggcctgctgccatagagattgcaaccactgagtcttcatttaggaaagcagccaggagttggctttgtacggccacatcttgttttctgtcgaccaataacctgtgaactaaagaagatttcagaactgagatgtgaaacagattcactctggatatatttttctacaaggggcttaaaaagtatagttgatcatttatcatgatgtgtttcattccattattacagacaacaaaccgtcttcactagcaaatcccacaactctctctcccactcttcaaacctccttttcagaagcaagcctccaggagagttgacactaccactcccagctccttcctatgcatccaccaatctacctcacgcttgcccctgcacccagcacccccggaatgctactcccctccacccccagccaggaggccaggcaggtaacataagattgaagcactgccacagaagtcctcgacagcctcccccacccaggaccccaggttccactccaagtacagccagaacccatagggacacagccccttgctgcccagaatcacaccctccaaaccctcgcttgcagacctttggagttagatgaccaagactggagagagctggctggaaaccatcagggaagtcaggtgtcgtccagcaggaatagcgagaccacgacatctcagccaagcatcatctctcagaggacccaagccccgcagcctccctccgactccctttttattctcccctctttcctgttccattcctgtgtctcaggccccctgctcatgagccattccacaacagctcctaccattcaaggagcaactgacctgaccgctacacgagcccctaccccgtggtctttgcccgtgccgctttcctgctttggggtacaagccagaagtccttcataggccagatactactatgtcctcccaaactggcatgtaggcaaagaaattttgttcaagaaagtcactagctgccttggtttctctccaaaattatagagatcataaaacagagatgcttaaaaattcaagggaaaaaaaaaaatacagtgcctatcttcagagtgtgactacaagaccccaggtagccagtggaatgcaatccactccctgcttttatctataccaggttacctgctaagtcacatgaggatttgagcatcttatttgggtctgcatgctttaggcagcagccatgcagcagaccctgggacaccaacaagcattgtcctgtgcatccacatcctcctttggagctgtgggcagcaagtggggaagcctaatttaactaaataacaacgtatgaaattatggagaatacaagagtggggattatcctccaaaattcatagcgaggcttctttagccagcaccagagtatttagcatgcactttaaaaaacacacacacaattcatgcacgcttctttccaagctcatctttacatatatggaaccagcccttgctcatgtggccccagagaacatgggccatgccctagagggctttcgagggctcagccagcactccacaaagcaataaccattgacttacccctacaccaagcttggcgacatgtgctcggccagatcagagattgctgcccttcagaggcaccctcttcaggatcagagctttgtttctgagtaagagcaaccagtattggctgggttgtgaggcccaagagctctaacttgagaaaatgccccaaatctaaacctttatccactgcccagcatgacatctgccataggttgaagcgttgtgggtcctgtgctacttgggacaggtgagagaaacaggtttgcaagccgcataccacagacccannnnnnnnnnnnnnnnnnnncttgagaaaagtcacctttttctggtgccagtctgtttgcagttgttaaagtgagaactgattaaggcaaaaccactctgcgtccttctcccacctttccatcgcaattgcaggttcctgctcatcacagtgcgatagtcgtgctctggcccagtccaaagagtggctcgacaaaggcaggcatctggacccagaagtctctcttctccatgtggaagtttcagctcccaaaatgcacaaccacatccggttcaaaagtgcccaccatctgccctggcaggcactaaaaattcactatagctccagacattaatccattaccccgcccactcttggctctcactggggcagaccttctaactgagacatagaaagtgggaagtgcccagtaatcaccaggctactaacggggagccagcactgtgccgggtatgacccacagagggctgaacaaaggagacacagcacctgccttcagtgagcttaaagacggctatgctatgacagtattaggcagggcccctagggtgcgtgtgtatatatgaagaaagagacagaaagagagatctattttaaggaattggctcatgtgactatggaggctggtaaggccaaaatcggcctggtaggcagcagctggagacccagagaagagttgcagtttgagtccagaggccgcctgctggcagaatcccctccttaaggggaggccagtctttttctattatggccttcaactgattgaatggagctcacctacatcacagagggtaatctgctttcctccaagtctactgatttaagtggtaatctgagctgggcgtggtggctcgtgactgtaatcccagcattttgagaggccaaagtaggaggatcgcttgagcccaggagtttgagaccagcctgggcaacacaggtagactccatctctacaaaaaaaaaaaaaaaattaattaattaattagccagacatggtggtgggcacctgtggtcccagctacttggaaggctgaggtgggaggatcccttgatcccagcagtttgaggctgcagtgagccatgatctcaccactgcattccagcctgggtaagaaagtgagacactgtctcaagaaataaaaaccaagaaatgaatgttaatctcatttttaaaataccttcacagaatcatctagagtagtatttgnnnnnnnnnnnnnnnnnnnnaatcatctagagtagtatttgactacacaccagagaccacgggctgtcttagtctgttcaggctgctataacaaaataccacagactttgttgcttataaactaatttatttctcatcattctggagtttgggaggcccaagatcaagacagcaacagacttggtgtctggtgagaggccacttcctggttcctaggcatccatcttctcactgtgtcctcacgtggtggaaggggcaaaggagcttccaggagcctctttctaagggctccaatcccattcactctcataccctaatcacctcgcaaaggccccacctccaagtaccatcacaatgggggctggttttcaagatatgaatttgtggggaacacaaacattcagtctttagcagtggcctggccaagctgacataacattaatcatcacagtgacataaacaaggtactgctccccatctctcctggaggtgtaaactactacatgtgcctagccctgtgataagcacttaataagcacctgtttttaaaccttataaccacccaacaaggtacgtgttattattatccccactttacagaagaggaagctgaggctcagagcagcagagccagaattcgaatctatgtctgtggtcagaacgcatactgtaactgctgatcctgctgcccgagatatccaccaccatgaaaatgtctgaactgcagctgctccagcctcacttccctgcagaccccgggaagcaaaagctacctatagcaggggctttgctctaacctccatcccaagagagccagcttcccagaccagtgtggcagtctggagagtagccagcagatggtcccagagctacaattttcagttagctaaggctggatatgcccagagctaaaattaatattgttttaaaatcaaatgtatttatgcaataaatagtacatcatattatctgcaagtctaggtgagtatcatctttatgtgtaaacttccatccaaagaaaattagtttatgcttccttaactctcacttatccaaggccactggccataatccccatgttcagagttcctccccttgaaccagagtctcctgccaaagtgaaatccagttaccaagcaggagatattggtcagcagtgaccagtggaactgggcggcccaggaagaagggatgggaagtgacgacccccaggacccaccctgtatgcaatggggaggatgcactcccaggtagagcaacaacagggagactttcagcatccctggggcacaagacagagaatgtgacttataaaccagacccttggggaaccctaaaaggagccaggccctgtgctcccactgatcaggctctctggaacctgcagggcaatctgaatcagcatctcctgatgcactgctaggtaagctcactcacatttcttcaggatataagaaaatgcatgctgtatattctcattttataaaagaatactggagtgcgggggcgggcggagttgggggtgggtggcctggtggctcatgcctgtaatcctagcactactttgggacgccaaggtgggtggatcacttgggcccaagagttggagaccagcctgggcaacacgacaaaaccccatctcaacaaaaaatacaaaaattagctgggtgtggtgacacacacctgtagtcccagctgaggtaggaggatcacttgagcctaggaggtggaggttgcagtgaaccgagatcacgccactgcactccagcctgggtgacagagtgagaccctgtctcaaaaaaaaaaaaaaaaagtagaattcgggggtcaggggcaagtgggaataggccaaaatgttaaacaccgtgttgtgggattataagtggatctggttttcctctacatgtttatttctattgtctagaacttctacagtaaactgtttatatcacttctgtgatcaagattaagagaaatctgacactgacactcactcgtgagtggtacaggtgcaacacagacagcatggttccctgtccacccttgctccctttgcagcagtcaggaacaaggactcatgtctttggtgaacaggggcaccctgaggggagactgttatctcccaagagtgagacacgattacagagcctgtagatcctacctattccttcctgcgcaaaggagggaaggaaaacaaaacagatgagccgaagaagatggactcattcctacacccaggcaagaattccccttgggctaccaccaagtatgtaagtgcctcaccaacttctacctcagaaacaatggtcagatttcccttcctcttcagggggaagattaaatcattcagaacaattttaccactaaaaacacttttaaaaattttttaaaaataaaaaatgttaaagaacatcatacaggaggtgaggaaagaatggagaagtgagcgcccagagacaggggcagggcagggagctgcttctctcccaacagcgcttgtctctccacacacacttgggctttccttccagtggcctcacagggaaatgggggcaagagttacaggtgggcaaagagttcttacacttggcaccaaaagcatgatccataaaaggaaaatttgatacactggacctcatcaaaatttcacatttttgctctgtaaaagatcctgttaacagaaagacaacattctaggagaaaatatctgcaaaccacatatccaacaaaggcctagtatctaaaatacatgaagagctcacaaaacttatggtaaaataacaaacaattcaattggaagataggcggaaaaaaaaaaaaaaagccaggtgcagtggctcatacctataatcccagcactttggaggcagaggtgggcagatcactggaggtcaggagttcaagaccagcctggccaacatgacaaaaccccatctctactaaaaatacaaaaattatccaggcatggtggcatgcacctgtaatcccagctacttgggaggctgagacaggagaattgctcgaaccccggagctggacgttgcagtgagctgagatcgcaccactgcactccagcctgggtgaaagcacaagaccctgtctcagaaaaaaaaaaaaaaaaggaaaagaaaagacaatgggcaaaaagaattcttaagcagatatttcaccaaagaggatatatagatgttaaataagcacatgtaaagaaatttaacattatcagccattagggaaatgcacattaaaaacacaatgagatatcactacacacctattacaattgtgaaaatactactctgataaaataaatagtgacaaaaaacactgctgaggctgcagaaaaactgggtcactcatgcatgtcagatgggaatataaaaaatggtacagactctctgagaaacggtttggcaatttttttaaaaatcagcatttaactatcatttgattcaataattgtacttttgggcatttatcccacagaaatacttaccttcacacaaaaacctctatacaaatgttcattgcagctttactcatatcagactaaaatgggaaacaatctagatgttcttcaatgggtgaagagtcaaactgcagtctattcataccatggaatattactcagcaataaagaggaatgacttagtgatagacacatcgaccttgagtgactctccagagaattaaattgagtgaaaaagccaataccaaaatattgcaaactgtacatgattccattccaagattacatactgtatatatgtatataccattcctgaaatggcaaaattgtagaaatgaagaacagattaatgatcatcagggatgcagaagggggatgcagtgggagggacctgggtgtggctataaaaggatgacatgtgagatcctatggcaacagaaatgccctgtatcttgactgtgtcaatgtcagtatcctggctgtgatcttgtactatggttttgcaagatgttacttttggaggaaactgagcataagtacacaggatcttgctatagtatttcttataactgcatgtgaatctgtaattatttcaaaagaaaaaccaaaaacctccagggccagatggtgtcaccagtgaatattatcaaacatttaaggaagatgtaacaccagttttacacaaactcttccagagaatagaaagggatgaaaaaaatccccaactcaggttgcaatactagaaaataagaacaaccccagaaagggacaattacaagcctattttactcataatgtaaataccaatatgctaaacaaaatatcagcaaactaaatccagcaatttagaaaaaaggatagtgcattatgtgtaagttggatgaatcccagaaatgcaaagttgat

SEQ ID NO: 3429 - DNA, 1517 bp, Homo sapiens
gtcacgggctccggtcccggcggcagaaatagggcagccgcggcggcggtggcacagcagcgggcagcggcggctcagggagctggagcctcaacagcctccagcgagcccgggacccgccgacagcccgagaaaccagccgaaggacgcggggcggggtcgccgccgccgccacggggtgctccctccctcccgcccaagtccggccacctggtcttcccctcggccccggccgtctcagactcatcaaaatgaaaccaggaggcttttggctgcatctcacactgctcggagcctccctgccggctgcgctgggatggatggacccaggaaccagcagaggcccggatgtgggtgtgggggagtcacaggcagaggagcccagaagctttgaagtcacaagaagagaagggctttccagccacaacgagctgctggcctcctgcgggaagaagttctgcagccgagggagccggtgcgtgctcagcaggaagacaggggagcccgaatgccagtgcctggaggcatgcaggcccagctacgtgcctgtgtgcggctctgatgggaggttttatgaaaaccactgtaagctccaccgtgctgcttgcctcctgggaaagaggatcaccgtcatccacagcaaggactgtttcctcaaaggtgacacgtgcaccatggccggctacgcccgcttgaagaatgtccttctggcactccagacccgtctgcagccactccaagaaggagacagcagacaagaccctgcctcccagaagcgcctcctggtggaatctctgttcagggacttagatgcagatggcaatggccacctcagcagctccgaactggctcagcatgtgctgaagaagcaggacctggatgaagacttacttggttgctcaccaggtgacctcctccgatttgacgattacaacagtgacagctccctgaccctccgcgagttctacatggccttccggcagaaatgctgaaaacattcatttgtcaaaactttgaaagccacaggactgagccaacaaggagagaagcaatcaggactttgtcatcagaggaggcggactgcccccacgtcctatcaaatttagtccggaatgtattttgccattattgtaactatgcccttcagctgccacgccgtttcaggaacggagcgctaatacattctgtggcacagtctctttatggggaggaaaggatcccagtgccccttgacagagagagaataatagcataatgcaacagaacatttttgaaatgctaatacacgctctccgcaacttaattttatttttttcttattggcttttttatatgacatttcacagtcctgtagcctcaatagctagatctgcatcgtaaaaatgacaacacggtgatttaaggaggagagtccatcagagcgaaatgggtggtgtgcttttaaagtatcagtttagcacctcttacctgggatcaatgttcattctcaatacatcattaaagcatcctgttaaatc

SEQ ID NO: 3430 - protein, 246 aa, Homo sapiens
MKPGGFWLHLTLLGASLPAALGWMDPGTSRGPDVGVGESQAEEPRSFEVTRREGLSSHNELLASCGKKFCSRGSRCVLSRKTGEPECQCLEACRPSYVPVCGSDGRFYENHCKLHRAACLLGKRITVIHSKDCFLKGDTCTMAGYARLKNVLLALQTRLQPLQEGDSRQDPASQKRLLVESLFRDLDADGNGHLSSSELAQHVLKKQDLDEDLLGCSPGDLLRFDDYNSDSSLTLREFYMAFRQKC

SEQ ID NO: 3431 - DNA, 3407 bp, Homo sapiens
gtcacgggctccggtcccggcggcagaaatagggcagccgcggcggcggtggcacagcagcgggcagcggcggctcagggagctggagcctcaacagcctccagcgagcccgggacccgccgacagcccgagaaaccagccgaaggacgcggggcggggtcgccgccgccgccacggggtgctccctccctcccgcccaagtccggccacctggtcttcccctcggccccggccgtctcagactcatcaaaatgaaaccaggaggcttttggctgcatctcacactgctcggagcctccctgccggctgcgctgggatggatggacccaggaaccagcagaggcccggatgtgggtgtgggggagtcacaggcagaggagcccagaagctttgaagtcacaagaagagaagggctttccagccacaacgagctgctggcctcctgcgggaagaagttctgcagccgagggagccggtgcgtgctcagcaggaagacaggggagcccgaatgccagtgcctggaggcatgcaggcccagctacgtgcctgtgtgcggctctgatgggaggttttatgaaaaccactgtaagctccaccgtgctgcttgcctcctgggaaagaggatcaccgtcatccacagcaaggactgtttcctcaaaggtgacacgtgcaccatggccggctacgcccgcttgaagaatgtccttctggcactccagacccgtctgcagccactccaagaaggagacagcagacaagaccctgcctcccagaagcgcctcctggtggaatctctgttcagggacttagatgcagatggcaatggccacctcagcagctccgaactggctcagcatgtgctgaagaagcaggacctggatgaagacttacttggttgctcaccaggtgacctcctccgatttgacgattacaacagtgacagctccctgaccctccgcgagttctacatggccttccaagtggttcagctcagcctcgcccccgaggacagggtcagtgtgaccacagtgaccgtggggctgagcacagtgctgacctgcgccgtccatggagacctgaggccaccaatcatctggaagcgcaacgggctcaccctgaacttcctggacttggaagacatcaatgactttggagaggatgattccctgtacatcaccaaggtgaccaccatccacatgggcaattacacctgccatgcttccggccacgagcagctgttccagacccacgtcctgcaggtgaatgtgccgccagtcatccgtgtctatccagagagccaggcacaggagcctggagtggcagccagcctaagatgccatgctgagggcattcccatgcccagaatcacttggctgaaaaacggcgtggatgtctcaactcagatgtccaaacagctctcccttttagccaatgggagcgaactccacatcagcagtgttcggtatgaagacacaggggcatacacctgcattgccaaaaatgaagtgggtgtggatgaagatatctcctcgctcttcattgaagactcagctagaaagacccttgcaaacatcctgtggcgagaggaaggcctcagcgtgggaaacatgttctatgtcttctccgacgacggtatcatcgtcatccatcctgtggactgtgagatccagaggcacctcaaacccacggaaaagattttcatgagctatgaagaaatctgtcctcaaagagaaaaaaatgcaacccagccctgccagtgggtatctgcagtcaatgtccggaaccggtacatctatgtggcccagccagcactgagcagagtccttgtggtcgacatccaagcccagaaagtcctacagtccataggtgtggaccctctgccggctaagctgtcctatgacaagtcacatgaccaagtgtgggtcctgagctggggggacgtgcacaagtcccgaccaagtctccaggtgatcacagaagccagcaccggccagagccagcacctcatccgcacaccctttgcaggagtggatgatttcttcattcccccaacaaacctcatcatcaaccacatcaggtttggcttcatcttcaacaagtctgatcctgcagtccacaaggtggacctggaaacaatgatgcccctcaagaccatcggcctgcaccaccatggctgcgtgccccaggccatggcacacacccacctgggcggctacttcttcatccagtgccgacaggacagccccgcctctgctgcccgacagctgctcgttgacagtgtcacagactctgtgcttggccccaatggtgatgtaacaggcaccccacacacatcccccgacgggcgcttcatagtcagtgctgcagctgacagcccctggctgcacgtgcaggagatcacagtgcggggcgagatccagaccctgtatgacctgcaaataaactcgggcatctcagacttggccttccagcgctccttcactgaaagcaatcaatacaacatctacgcggctctgcacatggagccggacctgctgttcctggagctgtccacggggaaggtgggcatgctgaagaacttaaaggagccacccgcagggccagctcagccctgggggggtacccacagaatcatgagggacagtgggctgtttggacagtacctcctcacaccagcccgagagtcactgttcctcatcaatgggagacaaaacacgctgcggtgtgaggtgtcaggtataaagggggggaccacagtggtgtgggtgggtgaggtatgaagggcccagagcagagccctgggccaaggaacaccccctagtcctgacactgcagcctcaagcaggtacgctgtacatttttacagacaaaagcaaaaacctgtactcgctttgtggttcaacactggtctccttgcaagtttcctagtataaggtatgcgctgctaccaagattggggttttttcgttaggaagtatgatttatgccttgagctacgatgagaacatatgctgctgtgtaaagggatcatttctgtgccaagctgcacaccgagtgacctggggacatcatggaaccaagggatcctgctctccaagcagacacctctgtcagttgccttcacatagtcattgtcccttactgccagacccagccagactttgccctgacggagtggcccggaagcagaggccgaccaggagcaggggcctccctcccgaactgaaagcccatccgtcctcgcgtgggaccgcatcttctccctcgcagctgcttcttgcttttctttccatttgacttgctgtaagcctgagggagagccaacaagacttactgcatcttgggggatggggaaatcactcactttattttggaaatttttgattaaaaaaaaattttataatctc

SEQ ID NO: 3432 - protein, 838 aa, Homo sapiens
MKPGGFWLHLTLLGASLPAALGWMDPGTSRGPDVGVGESQAEEPRSFEVTRREGLSSHNELLASCGKKFCSRGSRCVLSRKTGEPECQCLEACRPSYVPVCGSDGRFYENHCKLHRAACLLGKRITVIHSKDCFLKGDTCTMAGYARLKNVLLALQTRLQPLQEGDSRQDPASQKRLLVESLFRDLDADGNGHLSSSELAQHVLKKQDLDEDLLGCSPGDLLRFDDYNSDSSLTLREFYMAFQVVQLSLAPEDRVSVTTVTVGLSTVLTCAVHGDLRPPIIWKRNGLTLNFLDLEDINDFGEDDSLYITKVTTIHMGNYTCHASGHEQLFQTHVLQVNVPPVIRVYPESQAQEPGVAASLRCHAEGIPMPRITWLKNGVDVSTQMSKQLSLLANGSELHSVRYEDTGAYTCIAKNEVGVDEDISSLFIEDSARKTLANILWREEGLSVGNMFYVFSDDGIIVIHPVDCEIQRHLKPTEKIFMSYEEICPQREKNATQPCQWVSAVNVRNRYIYVAQPALSRVLVVDIQAQKVLQSIGVDPLPAKLSYDKSHDQVWVLSWGDVHKSRPSLQVITEASTGQSQHLIRTPFAGVDDFFIPPTNLIINHIRFGFIFNKSDPAVHKVDLETMMPLKTIGLHHHGCVPQAMAHTHLGGYFFIQCRQDSPASAARQLLVDSVTDSVLGPNGDVTGTPHTSPDGRFIVSAAADSPWLHVQEITVRGEIQTLYDLQINSGISDLAFQRSFTESNQYNIYAALHMEPDLLFLELSTGKVGMLKNLKEPPAGPAQPWGGTIMRDSGLFGQYLLTPARESLFLINGRQNTLRCEVSGIKGGTTVVWVGEV

SEQ ID NO: 3433 - DNA, 25018 bp, Mus musculus
  misc_feature (1)...(25018): n = A, C, G, or T/U
atgctgttacccaagatgcaatggtttcccataatgcctcattgtttccagaaggtcaggtacaagtgaggccagtgctatctgtgagcactctatctgtcggatttactgtgtggcttgtgaaaccttttgtcttcttccagggaagccctatggcagcagagggggtctccacctgatgcttggcattcttcagaggcctcctctaggaaccccatctttccagctggaaggggtgccactacccgtttaatccagcccctgcttgctccaccaaggaagtttggtagtaacccttgactctgttctcatgctgttgactcccccattcttcccagcctggccagcagctgcccacacaagtgtgacgaagactcggaaccctggcacctagcactctctgagcacacagtactcagtactcatagtgctatgcatagtagtaatggcctttaagctctgtgttttatccagggcatagcatgagtctgcactgtgtatccatttgtggagatctgtatgtattcattcaaatgaatattggttccatcaatgtatgaaggaatgaagaggatcagcaaataattcatatattctacacaatcactctatgttctccagtaagttaatgacctagtaagcaggcatggcagtatcccagctttcaggggtggaagcaggaacatcaggagttcaaggtcatcctgggatacatagcaaatttgagaccatcctgagttacataagattgtctcaaaagacaaaacaaagcaaaaatatctttaaacttttaagttaaattaaatgacctgccaataaatattctatggaattggaacagtggttactaagttcttcactgtctttctaaacgttagaagtgtagcaggcctcagccattattatttgggagaataaatcccaagtagtcttccaaatggtggcaaattctatttgcttcatcttcagagcttcctgtttgtagagcctcctgagttggccccagccctggatcacatgttccgggacagtaccctggagctgagagtcacactagagtcacaccagagtcacagagctggttctctcttcccaacaagtgtactcgcatacacacacacacacacacacacacacacacacacacacacacactcacacacactcactcacacacactcacactcatacacttacacacactcacacacacactcacacactcactcacacacacttacacacatactcacacacacactcacacacactcattcacacatacatgctctctcacacacacacacagaaatgctggggaaagctgagaggctgctttctggtttcctctcttcttcctcctcccctcccctcctttcgcctgcccttgcctcccctcttcccttcccccacagtatcctcttctctcacttcccctccacaggtttatacagatctttatccacctgttgaaaagcaacattggcacaggcttcctgggactgcccctggctgtgaaaaatgctggattgttggtaaggggcaccatgggctagaatccaggttcatccaggtgtcgaggagataagtctatagacctctgtgatgggtgactctcgggaccgagctctgcaatagcaaatgtgcccatcagtttcttagaaccaaccaggaagcatactgagcacttctggggagggcagccaatgcccaatattgggctacacttgcagaatcccattcgccaccctcctctctagtccctggggtttcatgtcacccacctcccattttacacacactcactcacacactcacaaacacacactcacacacacatgctcactcacacacgcacactcacacacactaaccttgtcctgtaaacttgtgagtgactcctgtttcatgacacctgacaaggcaccaagcaggggggcaaggtgctctccagttcaaggccaacctagactgtgaagtgagtttcaagtaagcctgagctacatagcaagactgtctcaagaagaaaagcaaacccacaagggtcgaggatgtggcttagccaaagactggttgcatgaagccctgggttctattctatgcactgagaaataacaataaggataacagcatcagatggtgtgtgagacaggggctaggcatgggaaggagaatgtccccaccagtgctcatggcccctacaccctgctacctcctggcttaggcctcctttcagaatctgtactgtgttctacaaccatgaaggctgcagcttacaggcacacatcctggagtccttagggagcttgcaaaagtctgacacacttgctctgagtctgcaatagtgaacaacatgactccccttcctcccccacagtcctgctctggaaatctgcacacagaaaaccccagtagtgcccatagggttaggaagatgccacgtgtaagatttcttgtcagtcagctcgtcttctccaggtttcgtaagcggccccttgcttccttccatctgacttctgatgacgaatagttccagccagagggaggacctctccttcggagttctctaggttctagatagatatctgcaagagagccttaaacctctgtagccttggccacattgtctctgtcagtgtgctctgtaatcccctgctagctctttagactgtcctctttgtctcgtaggagtgtgcctggccccaaggattaaaggttgtaaacaagacaagaggttctgccatgtggaggctgcctcctagtgggacttacttaacaacactcttgaccatgcatgtgtttctttgtgacaaaataatgtcacccaggacacatctataaagtcacattgtgcccttccagtcatatccaaaggaccgtggttcaaatcaactttgcttcttcaaagagacaagcagactctctggggcagtgatgctcaactgggaagagtgttctaaatcagcttccacccctcccccattgtctgcaatgtccaggaacagttaaggtccctgcccacaccctgcattctgcattgcacagagtggttcaaactggccttaacagactcacctgccaagtgtccctgaggcctgctggctaaccatcatcagagaaggccactgcatcacaaaaaaatactttggtctttaaggatcttaggagagtggggactaaggtgtgtaaaggagttaaatttaccatgggggattctggaagaatatatttggaggtagatgaaaaaaaaagtctgggttatatggaatggtgactctttgttcctggaagaattctagccagtgtggggcagcccctcagcagtgacactaaataggatcctgaggcagaggacattgagctgacagttcatcatgaataacttccagttagtaggtaagttagctggttggttggatggttggatggttggttggttggttgcatgcatgcttgcttgcttgcttgatatactcattggttggttggctggctggttagatgattggttggatggttatgtagttggttaattatctgattggttggatgactggctggttggttgactggttagttgattgtagctcaaactggcctcaaactcacaatgatcctcctgtctcagcctaagtgctggcattattggcatgcccctccatatacagttttctgtctgcttgggtcagtgccaggatgggatccaggatggtacccatgttttccaagccctcaccaatgagatacacacccagctagagattcttaattctaagagccctagtgtccagactgcatgagcaaggctgtggatgtggccagcttccatctcactgttttcctgtcctgttcctccaggtggggcctgtcagcctcttggccatcggggcgctcacagtgcactgtatggatatcctgctgaactgtgcctgccatctcactcagaggtcagagcccacagctatcaccccatgggccccatcccagggccacttctccgggctagcaccactacttctctgggttttttccaaagattggcaaagggattttggaggagtcttggacagaaactgtcttctactttgaggcatcacataggcttttgtgtttgaacgtttggtccagctctgtggcactgtttgagaaggctatggaaagttagggggtggagcttgtgggaagaagtgggccttatgcctcctctccactctgttttctggtgggaggagcaccaggttcacactgctaccacataaactctaccatggctttcttatcgaagtagactgtatctcctcagactgagacagaataaactcttcctccctgaagttgcttcctgtcagatgtttgggtgtaacagaaatcaggcaggcctgtagacctgtggtagaggctttcctagtatgtatgagcccctgagttccgtccccatcacctccaaaagaagctaagatggtgtcttggtgtagatccaattttgcagctagtgaattagaagccactctggctcccacagcccactgcccccccctcacctagaggcaccaaatatagcaaaatatgtaaaagtgccctgtggactactgagtatgtgtaggatcctcagacatcctcttggttcattcgggattatgggtttttgggtttttttaatctgtatatatatgtgtgcaccttcatgagttaatgtgtaccatgggtgtgcaggagcccctcgaagcccaaagaaagcatgagatcccctgattgttctgagccaccatgtgggttctaagtcctctataaaagcagtaagcgctcttaaccactaagctatctcttcagcccacccccattttttgaatcagggtctcatgtagcccaggtttgactctaagtcactatatagctaaagatgactttgaattcctgatcttcctgactccacttcccaagttctagtaacaaagtcatgtgattccatgcccctttaatgcagtgctggggatcgaacccaggacctgatgtctgctagacaagcactccaccagatgagctacagtcccatgcccttctttttcttttcctctccctactgcaatacaggtactttatcagggccacttgttcctcccccacaaaaacaacaacaaaaaccttttcaaagcaagttaataaaaatggaaaagacagcaacgatatgagcagtttgtaattgcttcagtcattaaatgcacatctagtgggctggaacgatggttcagcagttggaagagcatcctgctcttcaaaaggatccaggttcagttccagcacctgcatagttagcacacaactgcctgtaactccaatttcagggtatccaatgctctcttctggcttcctttggcacctaaactcacatgcgcatcctctcacccagacacaggtatatacatctgagatcttaacataaaaactactgagagccgtccccatcacctccaaaagaggtgtctcagtggtttctttctcgctgacagtgcagaataatgagttcctcaggagccagtcacccccattacatttaggtccaagtctgtcctcggaagtgagcaaaggccttatacagaagtcaaggcagggtaacccagaggctgaggcaggagaattgccagttccaggccagcctgggcgatatcatgagcattcttgaagcaaggatataaagtaaaggtttgcatggactggggatatagctccgtagtagggcacttgcttggcatgcaagttcagtctccaagtctcattaaaagccaaataaaaagaagccaaataatggatgtgcctggagtgtgtgctggtcagagcaccctttcgcctcgtaaaacctgtcacgcagcagggttttgctcattcagcagtgatgtaaacagttcaactctgttgagccatgggctttgcaagatttctgtactccttccaggaacgtcctggaatagaaactgtttttattcctattttacagatactttgccctgagtcacacacatgggaaatggcagaatggtctttgttggcctgcctgactttatttttttttaattagttcttttaaaagttcatacaaagtaatttgtgtgaaatgtaatattctccttccttccccaattccttccagatctactctcttccctaccctcccaactcctttccttcccttcccttcccttcccttcccttcccttcccttcccttcccttcccttcccttcccnnnnnnnnnnnnnnnnnnnnnnnnnnnnnnnnnnnnnnnnnnnnnnnnnnnnnnnnnnnnnnnnnnnnnnnnnnnnnnnnnnnnnnnnnnnnnnnnnnnnnnnnnnnnnnnnnnnnnnnnnnnnnnnnnnnnnnnnnnnnnnnnnnnnnnnncctgcttgttgcatcagtctggctttttcctctgactgaagtctctttttgtttttctctgacataaacatttaaggacaatggtcttttatccgactgggcacttcttccatttttgttttggtaacttcccaaactgtctttaactctttatgtagtccagaatggactggatctctggatctcctgcatctacctccagagtcctggggtgacaggcacactaagtcctaaacccctcctctcagtgcccccagccctgcagttagctctgtgcatgtggtatctggccagcagctgctcctcccagttcccacccagaaccaggagggtcctactacagagccacctgctccccttagaagagatcgctttcacctttgccagggctcccatcctggctggccatgcccactctgcctcttcctccagctcctctcctgctttgcttattttacccaaagcacaggtactgcttattccaaaggacaaaaccaaggaaaacattgtgtttaaagcatgctgcctgtaaggaggtcagagcatttccagctgtacaagttgcaggccatcctgggctacatgagaccctgtgctctccaccccaaaaaaacccaccaccagccaaaaaaaaaagcataaatgcataaaaattgtacaaacaaataagcaaactcatgaaagttgcatacatggtgtccttattagagagtgcacagaacactcctcactaacacacaaacacacaacagtccccagcttaggcgcatactgtgccttcagcaagagtgttttaacttaagcatcctttgtcctttcaccctagactgcagaggagttttgtgaactatgaagagaccacaatgtacagcctggaaacgtgtccaagtccttggctgaggacgcactcagtgtggggcaggtactggtcacatgtgtaatactcacagtgatgaaaccctgagagaaccccccaccagccctgcctttatgtatgtctgctcacacagggtttttcgttgtcgttttattttaaaagattttattttatatttaattatatctatggtgtgtctctatgtgagcatgcacatatgactgcaagttccgctaggaggccagaggagagcatcgatccactggagctggagttaacaggtggctgtaagtcccctgaggtgggtgctgggaactgaacccaggtcctctgcaagagcataatgtgctcctagccactgagccatctctccagccactgctttcacagtgttttgtttgtttttgtttttttttttttttagtaaataggctatttttggcaactataaagcaagatagagtatctccccactaccccagccctacctccttcttcaccttagtacaccaagatatatgtgaacaggaaaggacttgtgttaattttttttttgaaagaaaagaaagaaaagaacacatgtagcaagggtgaccttgaactacctaaggtgccaaggatagtgttgaaccttcccatatacgctgggttaatgcccaaattgaagcttcataaaccaggctagaactctaccagctaggctccagcttgagccctagttcatttaacggtttcttgtatgttacttagaattatatgtataatcttgaaattcatttttgcttactggcttgcttatttgtttgtttgagatagtgtttcctgcttgccaggctggcttcaaacatgttctgtagcctcctccttcttcccaaatgtctggcatgcacctccacaactagcttgaaattagatttttttttttaaatctaacagtttatcagtcacggtcctgatgctgcaacagagtatctgaggaaagctacttgaggaagaaagggtttatcccagctcattgttctaggggagtctataccagtgctaggaaaggcatggcaagtaagacaagaagcagctggttacactgtgtccacagtcaggaagcagagagagatcacgcagctgctcaacttactttctcctttttattcagcccgggctccagctcaaagaatggtactgcccacttcccgggtgggtattcccacctcaatcaacctagtctttttttttttttctttttggtctttgttttattttttgagacaaatctctctatccagcacagccctcattgttctagaactcactatgtagaccaggctggcctcaaacttgaagagacccaactgcctctgccttctgagtcctgagattaaagacatgtgccaccatgtctggccagtcaacttattctagcatgtctttcacagacatgcccaaaatttgttttccttgtgattctatcctgtcaatttaacagtagacatcaatcatcatggatagtgttcctcttatttttcccatcttgggacacacaaacacatctcatcatttgaaggttcagtgttctctgatgggaatgtttaccttgttttagataaccaggcccctcgtgatggacattaagcttgctccctttgttgagggggcaaaaacctagaaaccactcagcacaagagtctgtattaaacctgctggcgactgcccagagagagacacttctcacagaacagccccggatgtatagtacaccgagtttttagagacatagttgcaagcaatcatttaacaagagccaagaacaagcagttagctggggtatttgaaccctgagtttctagaacagggctgagcgctttcctgtgggacacttcagggcagtgtatagaaaccaaagatggcttcggctgatactagatggagaaacctttgccccattacaccttgttttggacttcaggaagagatttcactgtcctagaaaaaatgggataaccagagatctcacaataacacataaaagctacaggagttaatggtgagccagtcctggtagcacaggactgtcctgccactgtcctagatggctttaattgtcaatttgacacaggctagagaggaaagcctaaattgaggagttgtctggatccgattggtttgtgagtaattgttttgactgttaattgatgtagtagaggccagcccacaccaccactctctgggtttatataagaaagctagttaattatgagcttgcgaagaagcattctcccatgagttctgcttccagtccttactctgtgctccagtcctgactttcctcagtgaaggaccgtgagagctgggggtgtaagtctgaattaaccccttcctctcctatgttgcttttggtcagagtgttttgtcacagcaacagaagaagctaggacagccacctttctaaaaggctgtcagagatacacagagctcaaagcctgcctgaattcaagacacagtgatgtagggagacccctgtgccaagattttaagagttaggcatgtagttcagcagcacagctggagcccctgggctagattttcaacacacacacacacacacacaagctgatgctgttcaaaatgcttttctgtttaatcatctcttatcatcttatcaaccttgaataggactccatggtgagatttcactgccctagaaagataggatgtccagagctctcacaataaaataacacataaaaggtacaaaaggcattgataatggtggaacaaagacatcccaagaccttccatgcaaccttctcggacagtccttcaggcagtgagtcaacaccccagcagctgtggtgccttccacactgcctcctcggctccacaggctcctcacgctcctctgtaggcatctatctctcaatatcagccagatgaggtcaggatctgtgtctgatgatgtcttcagtagatatgtagggcaggagcagcccgtgtaatcactgtatccatgcctattgagatggaaaattaaacagctcaaagaaggcaaccaagtcattcaaagccacacaggaatttattgtcagagcaaagactagaactcgaaatgtctactttccccccactaggattctgttttcccatttctttggagatcagtaactgcagaaatttagaaatttacggaagggagtctcacttgcaccagatattcttctttttcagtgcactgagaggctctcggaggcttgagtaagaacctcttccccacatagataacaatccctgatgctcaggctttagatggaaaaccagtgttgaactttataaaggagagagccctggtggccctgcccagggtgtcaggctgagcacctagcagcccatgtcacaggtgtcttgtgatacactggaggacataaagatccactctgaaattctcttaccagaaaaatcagcaaagaaacttcatctaatcagaccttttggcctgagattggctcacaagaaatactcagggtgggagaccaacataaacgatgcacaagaaagtcagcccagcccagaacataggatacgacaactggacggatagtctggcaacttgttacctccaaaaagtaaaaacctgcaaggaaaatggagctgggatgtagctcaaaggtagagcacctgcctagcacacatgaagttctgggttcaattcccagtaccagaaaacaaacaacaaacaaaaacccacagcaggaagaatgaagttctgggttcaattcccagtaccagaaaacaaacaacaaacaaaaacccacagcaggaagaatgacgtaatttttcaaatttaagagctgtaattgagttcaatgcataggcttgcctggatccaactttatagtgggtgtgggaggaggtatgtgaataaagggagagcctaaaccccaggacaacagacctttgtttccagtgtattgaaagagaaacaaagtgtcactgcctttgtcctctgcccaatgactctcttctggaggaagaaatcacacagacacaccatggtgacagtttataagaagaccagcctggactctccaaaatgacctgatgaaaaaccagtgcaaatgcaaaaaatgtgcaaaaatattccacatggaaaaaaaaaagacaaaagaggtacagccaaacacaacataaagctttggaaaatttttaacaaaaaaaaaataaaagttaagtcagatacagtggcaaacctgcaatcccagcacttagaaggtagaggcagcagaattaataattcaggggcagtctgggctatatatgaagtttaaagctagccttggctatgtgagactatgccctccccctcaaagaaagagatatttgtaaaataattaaaatatataaattacatatttgttgttagttgatttctgactattaagaactaagagaaatatgcctatggtatttcaagtagatatttcatgacttcggaaattatcattgaaatgaactgaattgaactgagtacttttggggagtgtggggtgtgtgtgtgtgtgtgtgtgtgtgtgtgtgtgtgttgtgactataatacccagaatgcaattcaaggccaaaggtaactacaaatgaatttcattagagtaaatggatgtgggtggttgtggtaacaccagcactatcagagtagaggcaagaaaatcaggttttcaaggtcacactggctttgtggtaacaccagcactatcagagtagaggcaagaaaatcaggttttcaaggtcacactggctatctggctaatcagaggccagcctgggcaccacaaggccctatctcaaaaaactaactctccaaagccagagtttatggctgttaatttctcttgtacaaccaactttttctgtgggtcagacatttctcaaaataaaaccatcagaaataattgttttgaaaaggaaatcaaaaaaaaaaggggtggggggctggagagatgcctcagcggttaagagcactgactgttcttccaaaggtcctgagttcaattcccagcaaccacatggtggctcacaaccatctataatgagatctgacaccctcttccggggtgtctgaagacagctacagtgtactcacatataacaaataaataaatctttttttaaaaaatagaaaaaagaaagaagaaaagaaaagaaaatgagatccatcctaaacagtaacttatttcccttgtccttgtcttccttcccaggtacgttgtgagcttcctgctgatcgtcactcagctgggcttctgcagcgtgtacttcatgtttctggcggacaacttacaacaggtaaagaggggtcttctgggcagagtgggtgggaggagagcagacctcccgatgctggggctgttagtgtctgcccatattagaccacagttgagaccagagcaaagccaaagcccctaacctttaggctggaaagcatctcaagttgtcacatccaagatatctaacgagcggtcacgttcccctcatctcgttcctaatgcaggcaagtcagacagagccttcttttacaacagctttgtgagacagaggagcacacccagccagacaggaagaacagtgtgccttgtaacagagggactgtttgagcagaggatgctcaatgctcagccccgccccgcttcacccacaaagtctaaaaaggatgtgctaatgtaacagaaactcctttctagtcatgtgagcggggaaaccaccacttcacagggaagaagagattgtctagcagacagaaagagccttgtgcctttgggcttcaggatgctcaatgtttcccatcgtcagaatcacacgcactacagtaaggcggttaggtttgcccagtaaaatgcaggacacccaaaaccagacacagaggttcacatccataacaccaacatttggaaaacagaagcagaatgatcaaaagttcaaggtcattctcagctatgcggcaaggctgaggccaactctgaaggatatgcgagaccctgtctaaagtgcttgtctgcttgtcttgccagcccaagggcctgggtaccatctcccaggatccccatatttaaaaaaaaaaaaaaaaaaaaaaaaaaaaaaagccaggtttgggctagagagatggctcagcagttaagagaaccaagtgctcttccaagggtcctgagttcaatttccaccaactatatggtagttcacaactatttatctgaagtgggattcgatgccctcttctggtgtgtctgactacagtgtactctcatacataaaataaatacataaatctaaaagaaaaaaaaaaaacctaggctttctggcctgcagctgtaattcagtgctgaggaggcagaagcagacggatacctgcagctcactggagggccagcctagcctaacttgcccagtaccaggctaatgagagaccctctctcaaaagcaaggagggccacatctgaggaacattactgattttgtcctctggagcccccagcaccacacacatgagtgcagagacacagagaagacacgtattgatgcagctgtagcgatggctcagcagttaaaagcacttgttgctctttcggaggatatagacctgggttcggttctcagcacccacatggtggctcaaagccatctgaaactccagctccaggggacctgacttccttttttggcctcttccaggactgggcatgtacatgatgtataggcaaacatttcatacaaataaaattaagtaaatctaaaaatgtcttaaggattcacttattttatgtgcatgaatgttttgcctgcataaatatatgtgcactacagactcatgagagtcagaggaaggtattggcactcctggaactgtgagccacagtgtgggtactgggaatgaaactcatgtcctctgtaagagcaaccagtgttttttagccactgagccatccctctagcaccggaaaaaaaaaagatatctggctatactgaaatgtcacacaagtcgtgaataatgtcttttctactgtggcagtaagttttcagtcgatgagctgaaatcctaattgaaatgactctcagtgactcacgactgacgtcctgcctttcactgtgtcgttctggcagatcatggaagaagcccacttcacctccaacgtctgccagccgaggcagagcctggtgatgacctccatcctggacactcgcttctatatgctcaccatcctgcccttcctcatcctgctggtgctcatccagaacccacaggtgttgtccatcttctctaccttggccaccatcaccaccctgagcagcctggctctgatcttcgagtatctcatccaggtctgaaaccacacagaagaggggcggggtccagggtttctgaggtgggaaaatgaagatgaggaaggtggccggtccccagctctgagcctaggtgaattctaaaaacacttctgtcccacaagctaggcatcactatcatctacaccctcatcttcggcatcatggtcatatccaataacagtgagtcactgggaatttagttgctgaatgttttctgtggtccagtgttgtgcaagaagctggggattttgtggttcaataataagagataaagaaggatgccacattctccattgggtcaacaaataacaagaactaccacagcagggagatggggagagggctcagtgggtaaagtgtttgccgccctagcgtgaggatctgagttcccacccccagtatccacatgacagcctagcacaatggagcacacaatgtaaccctagaactgtgagagtggaaggtgggtgggggttcactgaccagctgaaatggcaaacaccaggttcaatgagagactcaaaataataaggtggagaactataggggagacatcagatattgacctctggcctccacgcacactgacatggatacacacaccatggagacacagcactggttagtggacagaaactatatagcagctggctagatgactcagatccttgcctgaggccctgagttccatacccagcccccacagagaggtaggggaggactgactaccacaagttatcttttgatctccacatgcataccatggcacataagcccaccctgcccctccacaataaaataaatgtaaaataaaaagttttaaaagagaatatatatgatgaaggaatttgatctacttggtacaaaggacgttgcatgatttctggatctttgaagtaaaacaaacgaaaaataccaactctatcccagttcccagaaaaagacactgaggagcaggagcagcaggcaagcagagctttctgattgggccaactggtttacctcccatcactggcactaacatcccaccattgttgcttcatttctttgatcatgaaagtctttggaattatattagtatcctgttgctgctataacaatcacagatctggaagttgggggggggtgggggggggttgtttgttgtacacagtctcatgtagcccagattgactttgtagctaaggatgaccttgagtctctggtcctcctgtttctatttcccaagtgctagacttatagacatgtatcatgacacccaacttatgctttgctggagattgaacacagggctttgtgcctgttaggcagattattctaccaactgaggtataagtcaaggtttttttttttaattattgtttttgttttgcctttattttctttggtttcaaggtatttctcttgaaacggggtttcatgaagcccggctggcttcaaattctttaagtgttggagggtgatcttgaaattctggtcttgctgcttccacctctcaagagctgactttataggcatgggccaccatattttgattaatgcagaactaaggattaactcaattcctcatgcattctaggcaagcactctaccaactaaactacatcccagccttaaaataataaagatttcttctatgatgctagagatttcactgagccggctaatcagggatcaacagggctatatccttttccagaggttccaagagagagtctgctttcttgccttttccaggatgccttggtctgtggtccttccatggttaaagtcagcaacactaggctaagtcttcccatgctatagtcttgtgtcttcttccatttctctcttcctcttttaagggcccttatctggtgcagataattcaggttaatcttcttgtgtaaggtcatcagtttagcatcctaaattccttctgaaaactcagtactccagtcaagaatggtgacatgcacctataaacctagtactttgacagttatgacaggaagatagcttggtctacatagcaaaaacctaattcaaaaacaaaacaaaatataatctgactaattttgggaccacacacctttaacctcagttattggaaagtagaatcaagccaatctctgtgagtttgaggccagcctggtctacacagtgaattctagggcagccagggctatatacggagacatgtctgccaaccaatcaatcattagcagggcagcctgggctacatcccaacaaataaatttatttaagtaacataatagggattaggctgaggacatctttgagaagcctttaccctaaccaccacagagatctagtattaatcacttcttacttggctatagagcaagtttgaggccagcttgggctactcgatacaatgacacaaataaatgatcactctgtgtctttgatggctactgtatcgactgcatggccctgatgggaatgatggggaagaggtgttaaagggcaggaacaggacaagcactcttacctggcctgaggagtaaattgcagaataacttggggcaacttccttcttctactgttctgtctggtccatatttaagatgagaagacttcctatagcccccaggtagaagaagtagacgtagacaaacaaaccacatagagaagtgcgagaaagaatagaatattacttagcattgaagaaaatgagagggttttttaggattttttttttgtgtgtatgcatctttctctctctctctctctctctctctctctctctctctctctctctctctgtgtgtgtgtgtgtgtgtgtgtgtgtgtgtgtgtgtgtgtgtgcgtgtgtgtgtgtgttagagtgcctggagctacagttatagatcgttgtgagctgcctgaactctagtcctcgagaagaacaggaagtactcttaacccctgggccatctctccaaggccaggaatgagattctaataaatgctataatgtgcacgaaccttaaaatacactaagctaagtgaaataagccaaacacaaagaagacaaatggcacaagctcctactgacaggcattagaacagccatgttcatataaacagaacacatacatgggttgctaagaggtagagaacaaagaattagagtttcagtttgagttggtaagaaatttctggtgatgaacagtagagatatgaatgtctgagtgaatatactcagtgtgtaaaatgactaaatggaaaatgtgatgttaccttaccacaataaattagactaagtaattaaattaaacttagtaagtaaattagactaaggatgtggccaagtgggtagagtgctcaccttagcatgctggaaaactggggttccatcttcaacattgcataaaaccataccagatagtgcacacctataatcccagcaccctgggggtgggggtggtgcaggtggaggcaggaggattaggaatccaagatcatcctcaggaatagcctgggctgcatgagacaaatttattttgtctcaaaataattgatgaattaaaacagtttttaaaagataagacagtaagaaggtgctttacactgtctctgtcagcagacacaacccgaggtgacctcctcacgaaaagccaacgcccttcctctttttcagaccccacaccacagcaacctgcccctggttgcaaactggaagactttcttgctgttctttggcacggctatcttcacctttgaaggcgtggggatggtaagaaggacaaggtgcctcgcaggatgtccagctgtgatttccccatgtcacccgaccagtgttgtgggcagtgcagcccagttctctctgggtgaaaggaaaatctgcactgtcaagggcccctcccagcccggaccacacctcaagctactgaggcaaagatggagaatttactaatcagctcacactgggaagggtgtcggtgcaatggcaagcctgagacaagatgaagggggaagttagcatatggagtgggtgtgatcataaggctgatgtgatgtggagggcgtggccacctggggtggctttcaggaggtgtggctgtgtgaagagtgtagctatgtggagtggtgatgtggttgatctagccttgtagagaggtgtggccctgtgggtggtaatgtggaggggcgtggccatttggagtgagatggcaatatggagagtgtggctctgtggagggtgtggttatgtggccttgtggatgggtgtggccttgtggaggggcgtggccttgtggatgggtgtggccttgtggagggggtccctactacctactaaaacaacaactgtgcccataagggaacctagcagaagccatctaggaaaggctatggcaagcaagtgtttttcctggcgatggcccaccgttctgcatagaggcatagccctagagacttggtcccagggttccttctcgctgctgatatgcctttcttgccattattacataccctaatgattcttggtcatcggtccaccctattgggcaaatttcctgcagatcaccatgaagatgaattttcatgaattaatgctgtttagaggaattaatgactttatagaattcctgatttaattcgaataattttaggaagaaagtttaaggaaatggtttcagttgttttaccagaaagatgtaataaaatcagaatcaaaaatagaacgtgcccccctcctcatagaatagtaagtaaaatctatgcaataaagaatgcaatgagctttcctaagttacagtaaggagagaaatagacttgggacagatttgtgatcaaggaaaaacatacattctaggtcagctccaaggatgaggccacaggggtgcactatgataaagcaaggccatgtaacactgttgctttgaacttacaagaaggatcttacggaataaaccactgctttgaacttgctatcaacatccttctgtaactccccctttgtgtaacatttcatccatgaggtaattttataaagaatttctgtctaagagggtataaaagagtctgagagaagaaataagaaataaagtgtggcttttggagctctgtgtgtgtgtgtgtgtgtgagtgtgtgtgtgtgtgtgtgtgtgtgtgtgtgtgtgtgtgcgcgcgcgcgcgcgcgcgcgcgcctgacatttttatttttttccttttcttttctctctggctcacaaagaattaatgaactctgagcctctcacctggccagtgaggggcccttgagccagagagaaaagagttcaaataactatccttttttcctcactctcttgctgctatcagcaggagttaagttgccagcagccagcagcttttgggcatggaatagcaagagttaaagaatagcaaagagtttcagaaagagttaaattgccagaaataagcagcttttagccatgcaatacctcctcaactgcctttcccagggaactggatgccaggaagccctgcccctggcagaaacctgtacatccccacactatggccacttctctccaccttgtctttcccaaccttttgcttctaggttctgcctctcaaaagccagatgaagagcccgcagcagttccccgctgtgctgtatctggggatgtcctttgtcatcttcctctacatctgcctggggactctgggctacatgaagtttgggacagacactcaggccagcatcaccctcaacttgcccatttgctggtaggaagctgatgcctcaggtgggacagggaggcataggaggtgacccttggtgacagcatggcacacgtgaaaacagttaacctttagcagaagcaatgaacagttggcggccatgttaactgtgataatgggtgtgtttgaggactggcactggctccctctcaataacaacagccttaagctttatcattgaggatcccatggaacaaaggagaatgttgacatagaggctctcggtgacctttccagctcacactgtctaggagcagtggagacttgagtacaagtttgacaaaggtcctaagatgacatagagctgctgagcaaacagaaagtgaaaactccacagtagagcattcgtgcggatcgtctgaggccctagggttggatgatgatgatggtggtagtggtggtggtgacgatgatgatgataaatataaatattttgtgtgagataggttctcatgcatcccagaataacctcaaacttcctttgtagccaaagctagccttgaatgcttcagccaacctgcctctgtttcccaagtactgggattataggcatgcaccgcagtacctggtaattaaataataaataaataaataaataaataaataaataaataagtgtaggcatgtaccacagatggactgctatttaggcaagagtatgcccagatagaactccacctggagtccgtgcctccagtcatggattccctcacccacccacccatccacctaggaaacagctgtaggtggcatctctagaggaggtgtaggactcctactgactaagtacacattctaaagctaattaataggatcttcattctggttcctctatggccaagggcaagcctcccacccttctgtacagtaaggcttacacacgtgcctcttcctatcagtcaggacagcttcatgatgctgccactcttaactcttggttcacaccaccgtggtgcaggctctctttttaataggccagccacaactagggtgttgctagttgtcatgacagagccattgaatgccacctgcccttcccaagcatcctgtgctacagcttaaacgtcaaacttcagctgaaaaggctctcacttcccaccccaggcaaggaaaggcctagaaacctttgatggacaacatgaataatgactgcactctctggcagcaattgcttgctttaatatacagaaaatacttagaaaactgctgggcacacagcaagctctgtggattatcaactgttatcatggttatgggtcatcacagccttgggctttttcaagtgggtggggtgatggtggcattcaggtttcccaaagccagagcaatagaaagaggacaatgtcaccagccccaccctcctcgctgagctctgccaataaccagatgagatcacgaatgtggaattctttgaagttgtgccttaatttatgcaatcaagatatcttaatacgctgctcttcttggctgattgcacttcgtctagctattctgggcagagccttttcattccgtgggtggcagctaaatacatgggcagtgaactccagtcggtatgagtaagtgagtatgagtgagcagaggaaaggaaatcactcttgagggaagtcttgaatggacagggtcgacgggtatgtaaaaatcacaattttatatgcaaaaaaagatcttcaaaacataacaaataaacaccatttgttatttttttctatataaatacaatttgggccgggcgtggtggagcacgcctttaatcccagcactcgggaggcagaggctggtggatttctgagttcgaggccagcctggtctacaaagtgagttccaggacagccagggctatacagagaaaccctgtctcgaaaaaacaaaaaaagaaaaaaagaaaaaaaaatacaatttggtggctgagtggataattcagttaagtgcttgccacaaaagcacgaggtttgagtttgaccttcagtgctcacataaaaatctgggtttagaggcatatgcttgctctcctagcactggagaggtggagacaggtagattcatagagtgtgctggccagccagccagccaagccaaacgtgagagtcccagggcacactaagagacccctcgtcaaatacaagcttgacacccctacatgcctgcacacatgtgtgcatgcgcatacaggaacacacatacatagtacaatgtcagagactgaaatgattcacacactgtactaggacattaagagggcagtatgtcagtaggcatcaaaattaaaatcatagctggggcctgatgcatacatagctcagtggtatgtatagctcataggtagctgagtgcttacctagcatacacaaggtcctgggttcaattcccagcacttataaaccctgccactaatcccaacatttgaaaattggaatctggagatcaaggtcattcttggcttcaaggtcattcttggctgcatatcaaccttgaaggacgggacccaggatgagacccagtgtcaagaaaaagaaatttaaaaaataatttttttacttctagggttaatgtgtagataatgtacatattcctgtgtagatgtgtgtggtgtctgttaggataagcagatatgtgggtgtgtaccatatatgctgagatgtgcagacataagatacacggtgtgtatcaggggtgctgagacatgcagacataggtagagatagtctttgctgcattgtttcttggcaaaagacagaataatctaagtttgccattaactgttgactagttgaaaaactgaaaaaaaaaatctctgtgctgttaaacaagagcaccaggcatgtgtactcacggggaagaatttacaagaaggatttgtttatctattgtctggagacaggatcttgctatataagccttcttgacctggaactcacgatgcatatcaggatgcatcaaacttgtggcaatcctcctgcctgagcctcccgggtgctgggatcagaggcacgtgccaccacacccaagctttctgtttgatgaaataacaaaggtcagcaattcatggagccgtgccacctcgtatctgagggcattggtgtggctcccccactttctgtttaagattgcaggctcagggctggagagatggctcagtcagtaaagtgcttgccacccaaacatgaagacccaacttagaaaaccctcaaaacccatataaaagctgggcacagtgacatacatcggtgactcccaagttcctaagcggcataggcagagacagaagaatccgtggaagcgtgtggcacagctagcctgacaaatgcagcagtgacagaagagagagatgccatcgcaaatacggtagaaggctaggacagacgcttgaggttgtcattcagcccccacgtgtgatttatggcatgcacacatgggcacacatgtgcacacacacttgtaagaaatttaaaaagattctctgtacacggattatttctagaaagctctgaggaaacttcagtgggaatcaggtggggacaatggtcttttcctgtatggctgttatgctgtgactgtcctatacacagatctgacatttataatttttaaataaaacatggaggttcctatggctttggaacctccaggaatgtgtgcttccataggcctcccatgtcccctctgaggcagtctgacctgtgagggttctgatgagtcttgagccaccttccccgaagcctggtagcatttcacttcctttcaatactctgcctgcaggctgtaccagtcagtcaagctgatgtactctgtgggcatcttcttcacctatgccctccagttccacgtcccagctgagatcatcgtcccctatgtcgtctcaagagtgtctgagaactgggctctgttcgtagacctgactgtccgcacagccttggtctgcctgacctgtgagtacagaggcggtcatagacttctatggtgcacgtcatacctcagaatagtgcctgccccagcagccttggctctgccacttgcctctgagatctatgagatgcttgactccttgcttctcacgtttccacctgaaactggttcagaaaactatcacagagagaccctgtctcgagggaacaatgtagagagtgatagatgacaggacacttgattccctcctctggcttctacattcacacgggtgcatacacacacacacacacacacacaatttttttctccctacaaaaatgaatctttttaaagatcactgggggagagccagggtccagagctgtggtgcctggccggattgttgaactacaaagccatgctgttgggggattccctctttgaggcacactcattgagtctatgttcctctctccctgcaggtttctcagccgtcctcatcccccgcctggacctggtcatctccctggtgggctctgtgagcagtagcgccctggccatcatcatcccgccgctgctggagattgccacattttactctgagaacataagctgtgccaccattgtcaaggacatcatgatcagcatcctgggcctcttagggtgtgtacttgggacataccaagccctgtacgagatgacccagcagacccacttttacatggccaactctacaagggtccacatataattacctatttttatttgaatagctcttcctttc

SEQ ID NO: 3434 - DNA, 1374 bp, Mus musculus
atgctgttacccaagatgcaatggtttcccataatgcctcattgtttccagaaggtcaggtttatacagatctttatccacctgttgaaaagcaacattggcacaggcttcctgggactgcccctggctgtgaaaaatgctggattgttggtggggcctgtcagcctcttggccatcggggcgctcacagtgcactgtatggatatcctgctgaactgtgcctgccatctcactcagagactgcagaggagttttgtgaactatgaagagaccacaatgtacagcctggaaacgtgtccaagtccttggctgaggacgcactcagtgtggggcaggtacgttgtgagcttcctgctgatcgtcactcagctgggcttctgcagcgtgtacttcatgtttctggcggacaacttacaacagatcatggaagaagcccacttcacctccaacgtctgccagccgaggcagagcctggtgatgacctccatcctggacactcgcttctatatgctcaccatcctgcccttcctcatcctgctggtgctcatccagaacccacaggtgttgtccatcttctctaccttggccaccatcaccaccctgagcagcctggctctgatcttcgagtatctcatccagaccccacaccacagcaacctgcccctggttgcaaactggaagactttcttgctgttctttggcacggctatcttcacctttgaaggcgtggggatggttctgcctctcaaaagccagatgaagagcccgcagcagttccccgctgtgctgtatctggggatgtcctttgtcatcttcctctacatctgcctggggactctgggctacatgaagtttgggacagacactcaggccagcatcaccctcaacttgcccatttgctggctgtaccagtcagtcaagctgatgtactctgtgggcatcttcttcacctatgccctccagttccacgtcccagctgagatcatcgtcccctatgtcgtctcaagagtgtctgagaactgggctctgttcgtagacctgactgtccgcacagccttggtctgcctgacctgtttctcagccgtcctcatcccccgcctggacctggtcatctccctggtgggctctgtgagcagtagcgccctggccatcatcatcccgccgctgctggagattgccacattttactctgagaacataagctgtgccaccattgtcaaggacatcatgatcagcatcctgggcctcttagggtgtgtacttgggacataccaagccctgtacgagatgacccagcagacccacttttacatggccaactctacaagggtccacatataattacctatttttatttgaatagctcttcctttc

SEQ ID NO: 3435 - protein, 444 aa, Mus musculus
MLLPKMQWFPIMPHCFQKVRFIQIFIHLLKSNIGTGFLGLPLAVKNAGLLVGPVSLLAIGALTVHCMDILLNCACHLTQRLQRSFVNYEETTMYSLETCPSPWLRTHSVWGRYVVSFLLIVTQLGFCSVYFMFLADNLQQIMEEAHFTSNVCQPRQSLVMTSILDTRFYMLTILPFLILLVLIQNPQVLSIFSTLATITTLSSLALIFEYLIQTPHHSNLPLVANWKTFLLFFGTAIFTFEGVGMVLPLKSQMKSPQQFPAVLYLGMSFVIFLYICLGTLGYMKFGTDTQASITLNLPICWLYQSVKLMYSVGIFFTYALQFHVPAEIIVPYVVSRVSENWALFVDLTVRTALVCLTCFSAVLIPRLDLVISLVGSVSSSAIIIPPLLEIATFYSENISCATIVKDIMISILGLLGCVLGTYQALYEMTQQTHFYMANSTRVHI

SEQ ID NO: 3436 - DNA, 38853 bp, Homo sapiens
tggtttttttttaaatttttttctcgagacggagtcttgctctgtcatccacgccggagtgcaatggcgtgacctcggctcactgcaacctccgcctcctgggttcaagcgattctcctgcctcagcctcctgatttgctgggattacaggcacatgccaccatgcctggctaattttttgtatttttagtagagatggggtttcaccatgttggccaggctggtctctaactcctgacctcaggtgatctgcccaccttggcctcccaaagtgctgggattacaggcatgagccactgcacccggccacaaaaccccatatctacaagaaatacaaaaattagctgggcatgatggtgaatgcctgtagtcccaactactcaggaggctgaggttggaggattgcttgaggctgggaggaggaggtcacagtgaactgtgattatgccactgcacttcagcctgggtgacagtgagaccctgtctcaaaaaataaaaataaaataaaataataaatgcataagtgcaacaggggaggggaaattattttcaacttgagaaaaagtcttttgggcatcagaagagagagatatttcatctgatattcagaggaagagagaagctcccagtgctgattttacagcagcacaaagaggtggtgtggggagtaccttggcccccatgagcttcataagcaatctgtgcagtcatcccaaacaaacgtgcaatcaaagtccagtgctggtgcttgctctgcaaaagcagcttcaggacgcgattttgttaatgccagtcccattctttctgttactcatatcaaaaatattggagtcttccttgattcctctctcttttataccccacctcaagttcatcagcagatcctcttggctttatctttaaaagtatccagaattcagtcacttttcaccatctctttcactaccaccctggtttaagccactacagaccgacacctgggtcactgcaacaccctcctggattattgtaatagcctcctaattgatatcccttgcaccccttcaatctgctcgcaaaaaaaaaaaaaaaaatggccagagacatcctgtcaaaatgtttaagtcatgtcatttctctgctcagaaccctccatgatttctcatctctcttaaagtaaaatccaaagttgttacaatagcctacaagatcctgcccacccactccatcccgctttcattacctctttaaccacatctctggtgtgaccatgtaattatcatccaaaccaggatatctctttttattttattttattttttttttgagatggaattttgttcttgtcacccaggctggagtgcaatggtgcgatctccgctcactgcaacctccacctcccaggttcaagtgattctcctgcctcagcctcccaagtagctggaactataggtacatgctaccaagctcggctaatgtttatatttttagtagagatggggttttaccatgttggccacgctggtctctaactcctgacctcaggtgatctgcccacctcggcctcccaaattgctgggattttaggtgtgagccactgagcgtggcctattttatttcatttttagggtggtttcccaggctggcctcaatcgatcttcccatttcagcctcccgagtagttgggtctacaagtgtgcaccacctcgctcagctgcaggatacttttaataatgaagggaggcaccattagtaattatgccagggcaataggcacaaaccaggcgaatccattctcctctgtgtgctcccagatagccatatgacctcattgccattcctaaaacaccccaggcactctcctgcctcaggacctttgcacttcttgcccctctgctaggagtttcttacccaagacctacatgagttgtgttccctcatcttgttcagccctttgcccaaatgtcactttctaggtgaggccctctctgatcacccaatctaaaattgcgaccctccccctagctgaaactctccattacccttgcctggattttctctataccgctttttactaacagatacttgatatatttgtttcgtttattgtctgtctcccccagcccctccagattgtaaattccatgagaacagagattgtagtaagttttctaccctaatatattcccagcatggagaacagtttctagcatatattagatgctcaataaatattttctgaacaaatgattttttttaaacatgacctgcactcccttccaaatcactggcaggccatacgcctcctgtatagaaattctgagcaggtggcatttgaactgggccttacaagccactcttcaccccaaacagggaacatggtagctggattatgttctgttgggccacatctgcatcccaggattctgctgcagctcattggctgggcagcctccattgtgaggtagctctggttttttccttgccaaagacagacaagcactgagcctggccccacgtccaggcaccaggacctccaatccaatggtgtcttcttcctcccagtcacactgttcactttgccctacagcagcaagggctaaactaggagaggccaaaagcccaggcaagtcctggttgggcaagcaattgcgagtgaaactgaggaccatcctgactgagatgggtctttcataagtcccccaagagccaggtgaggcatcatcaacatcagcctctcctgccaccaccgcttccctgattcatgcacttcaggcttcagccagcagcacgcatccttggggttaggagccagcatctcaggtcagcagccatggtttctctggagaaagacccatcagaggctcattcagagccttaaccctgagcctctgccacctacccaccgtgttgaagatgtcattgcttggaagggactacaacagtgagctgaactccttggacaacggacctcagtcaccctcagagagcagcagtagcattacttcagagaatgtccatcctgctggagaagctggactatcgtaagtggccgcaccgcccttccaggcctgaggtcaagcactgctgtttttgcaactctggactatgtcttccttcatctatctccttaacacgcttattccattaacacgatatgcgtggataaaagatgaaaccttcagaatctaaggaggtcaatccctgtggctctggctactagccctgtttcccagtttttacgaagaacccagctagagcagccaccctcaacatgagcagcttgtctccaggaacagtttcctatctcaggctgtctgccctttccttcctccctttctttcttccacagtctctggctgccttcttctcctcacacatctgccattattctctctgcctcttctccccaaccccccatgccatccatccagaaaacaaaaggtgctaaccccatgtctccacctttactgccccaaactcagacacatggaactcttctctctttttttttaattaaattaaatttaatttaattttaagttccaggatacatgtacaggacatgcgggtttgttacataggtaaacgtgtgtcatagtggttttgctgtacctatcaacccatcacctaggtattaagccccatataccttagctatttatcctgatgctctcccatcccctgccccccacccccaaccagccccagtgtttgtcttgttctcctccctgtgtccatgtgttctcattgttcagctcccacttacaagtgagaacatgcagtgtttggttttctgttcctttgttagtttgcggagtatactggcttccggctccatccatgtccctgcaaaggacatgatttcaacagaactcttcttctaggacttactgtcaatcacactgctatctggtaatcatcagatcggtaacaactgtgggcacaaagagattatcgatgacaatccccagtgttgataaggatatcaggaaatgccctctctcatcttttgggaagaattaaattggtatctttctagatggcaatgttacaggtcaaatcgtaaaatgtcatttgtataaaacatacaaatatttatttggcaaatgctgtctgaaagtatacaactcgtgcacacacacaaaactgacagcagtggttgcctctggggaagagaatttggaggctgagagaaaagagatttatatttgtttcataaggatttggattattgcgttttatcttttgaattttgtactgtaagtattacaatctagttctttaaagtataatgaaatataaataaatataccctttgattaataatacccctctaggaattttttctgatgaaataatagcacaagagtgcataatttttatcaaagcacttgttataatgtaaccactcaatgggttcaccttgcccactgcctagacagagacgatttatcaagacaggggaattgcaatggagaaagagtaattcatgcagaatctgctgtgcaagagaccggaggtttttttttttttttttagacggagtcttgctctatcgcccaggctggagtgcagtggcgcgatctcagctcactgcaagctcgagaccggagttttattatcactcaaatcggtctccctgagcattcgggaattagagtttttaaagataatttggtgggtaggagcttgggaagtggggagtgctgattgatcaggttggagatggaatcacaggggctcgaagtgagtttttcttgctgttttctgttcttgggagggatggcagaactggttgagccagatgaccggtctgggtggtttcagatggtccatcagagtgcagggtctgcaaaataactcaagcactgatcttaggttttacaatgtgatgttatccccaggaacaatgtggggaggtttagactcctggagccagaggctgcatgacccctaaactgtaatttccaatcttatagctaatttgttagtcctgcaaaggcagaatggtccccaggcaaaaagggggtctttttgggaaaggggtgataccaatagtcaaaccatgaaatgaattccttcccaaagttagctcagcctatgtccaggaataaacaaggacatcttaaaggttagaagcaagatggagttggttaggtctgatttctttcgctgtcttaatttcctcagttataattttgcaaaggcagtttcaataatattgaaaacttggaaacattaagagaaaggttaacacatgaaacaaacatacagtagaatatgatacagtcattacaagtgatggaggaaatgtatggacatggaaagtgtgtagcacatttattcatacagaaaattagttgaggatccagcatgcatagcggttctctttatgtaaaattcggtgcatttagagcaaataaagatgcccagaggagggctaattataatgtgtggttattttccattggtgggattttggaatttccttttataatagcaattgtatagttttcgagaaaaaatataaacccaattttttaagtctcaggggagcttgcaacatctatttatgcttcaaggtccagatgggtaaatgctgtcagctaaggcacagtggttcctccgaaaacttgtctcacctttcccacaatatctgattcaaataggggcaagacatcgatgctgtcatgggaaagaagtgagagacaaaggaaaaaagagcagagggtgggaaatgggaccacatcttttggagaaattactacttaagaattgacaaattacagttatcaagaaataaaggttatctcttggaagtaaagggacaatgggtgcccacccccccatccttaggtgaatagactgccctaacagaagttaggtcaatagacttcactcaatagactgaagtcacagaagtccccaacagttcatctgttctctcaacccaaccctctctcaggtcagcattgaaatgcaaagacctggttggttacagcttcttcctagccccttgccatgactctctaatggataagacaaagagatgtgagcactgtctctgctggactcacttgggcagttggttttggctctcctggccacctgcagacaatttaagtgtggcaagagggcattctctgtcttagcctgagacttcgtctgtatctcccaatggcatcttcaaggtacccttttgttcttgggtggagggggcacttctacttgcttaaaccagcccatgcttgcctttttcctatcatcccaattcttcttcctcttgaaggatgcgctttctaacaaatgagcaccatgaaggccaaaccaaaggtggcagtgaggatgatgatgatgatgagacaatgatatgacgatgatgatgctcacatctgtgaagcacttcatgattccatgattcatcatgttgttacctcttttgagtcttacagcttccctgggacataggcaaaactagaattttctcccttttttggcagtgaaacaggatcaaagcagctaatggcttcccaaagtagtaaccaaacacagtaggttagcggcagagctggaactcagaattaagtgctcccatctctgggttcaatgcttacgcatgtactttttatttaagttcctttttgattctgttctcatgatcctgttcccacctttcccacccaatccacatcaggattggagctgcctgggcaggagctgccagcacaggtgtgaagaatatttagaaccctaggccctagcaccctgctgggaccatcataagtactctatatgcacagtaacaattgctattaaattattaaattttacccagtgcataatgtcgatatatagcaattcatatatatataatatatatatatatatatatatcaccatgctcatctgactctactttgccacaattctccccacagtcctccccactccctagcatcacatgcagctcatttcatatatatatatatatatatatatatatatatatatatatagagagagagagagagagagagagagcgcacaagcaattcatattcacaatgaatattggttgaacaaatggatgaaggagtaaactaaaaccagtaaatatcccatatatggtagatttttgtttctagtgagtgagttaataaataacctgatgtctcactgtagactgaggcaactattactaatttttccattgtctatctaactgatagacatgtattaggtcacaataaatgttatttgagagaataactcatgaaagaaatcactggatgaattaatgaaccaaccagtactagagtgttatccagaatggtagcaatttttatttcctttagagcctagtgtgtattaaagatttgttgagtcacttgaactagcaccatccccagatcagatgttccaggacagacccctagaactgagagttgtctccaagtccacctcatcaggttttgcccctcttcctatcaggcgctctggagatgccagaaggaggctgagtttctggccatgcttcccttccactaacagtaccctctgtctccctactctccccaccacaggatgatgcaaactttgatccacttgttgaaatgcaacattggcacagggctcctggggcttcccctggccataaagaatgccggcttgttggtaagaggcatctgtgggatgggaactaggtttgctcatttgcagaagggggtgataggtcctgaaggccttcacactgttatcaatgggcaatttgggggtaccctctgcaattgaaaatgtgcctgttggcatcaatcccctggagtcaacctgggtccaacctgagcatccctggagggggcacaccattactcttaaagactcaccatgctcatctgactctactttgccacaattctccccgcagtcctccccactcctaggatcacatgcagctcatttcgtcatttgcattaacagcccaatccctgcaggcatttgagtgtgtgactcctgttccaaaccacttgagggcgcatgagaaagtgtcttggacatgaagatagacgcctccatcaatcccaccaatccactctccccacaccagcctacctctttctcttttcctgtgctgttcctgccccctcatttctgtctttttaaagtgcctcctctctaaaactttacactttcttatgatcactaatgccatcctcactttgtatttttctaccatttatatctaccttacctgggattcttaaagcacttacgaagataagatatttatttatttattattatttattgagacagagtctcgctctgtcgcccaggctggagtgcagtggcacaatcttggctcactgcaacctccgcctcccgggttcaagcgattctcctgcctcagcctcccgagttgctgggattacaggtgtgagccaccacgcccagctaatttttgtattctttgtagagaggttttcatcatgttggccaggcaggtctcaaactcctgacctcaggtgactggcccatctcggcctcgcaaggtgctgggatgacaggtgtgagccacctcgtccggtcgacatatttattttctaacagacccaccttcctcatttaattgaaagctctgtgggcaagaactgtctgatttccctttgcacgtccccacggtagcctctgtagggactggcacacagcaagtttccattaacatctactgaatggaatagataccaaatatataattccatttccttggagtgaatcttttcttatctccaggcctggtaagtggctcccatgtctaaagaaggcgagacccttgctgcctctgtcatgacttctgatcttcagtggttccaacccagagactggactctcccctttggaatcctctgggttctagagcttctacaaaaaaacatggtcttcagccaaactatctttgccagggtggtatttgtttttaagacaatgcttttattctttgatatttgcttcctcagagtcattagatgatttctttacctttcatctcccaccagaacctctggccatgattcatttgagaaatatttattgagcacctatctaccctgtgcatttgtagcccctgggaatatagaagcaaacaagacacgagagtctctgctgcatgaagcctgcattccagtggagtctagtggtgctcttgatccctcatttatgtctttgtgataggtcacatctataaagacacaagtgttcagaacaaaggatgtgagagggtccccgtttatacccttctgatcacctctggaagatataattagtaatcagccccactttttaaaaggaatttgacaaattagacacactacagtagtgatccccaacttgggatcattttgcaccagctcctgctaccctagccaaagacctttacaatctctacagacatttttggttgccacaatctgggggaagagtctctgacacctagtgggtagaggctcgggaaagctgctaaacatcctataatgcaaaagacagctcctgataacaaataattatctgccccaaaatgtcaatagggcacctgttgataaactctgtactagaggaagagaactgagtcataagaacaccttggccctcaatcatcttggaggaagtgagggccagggtgtgtcagacaaaataaatttaccacaagggactctaaactggtagaactcaaggaaaatgagaaaatgcatgggctatgtgggaaggtaatgagctctctgtcactggaagtatcctagcagaagttgggcagccactctacagggatgctaagaagagcattcaaattctagcatctgggagcatgaggacattcaggctgggtctgtcaccccaaagacagttttattatgcaacaggccccagcacgcagactgtgagagggccagggaatgggagtgatcatttctggctcacttccccctttctcctctcccctccaggtcggtcctgtcagccttctggccatcggggtcctcaccgtgcactgcatggtcatcctgttgaactgtgctcaacacctcagccagaggtcagaggcctgcttctctctcattccagcactggggcccctctgagggtgtgttgctcttcttttgaccactgacccaattaattcggccactgctccaggccaccttcctaccaatctggattctatgaaggcaaggagagcatgacagagagtcccagttagagactctaggcacagatccaacgctgctgctaacaagctggatgactgtcaaattcctgcatccccctgagcccagatctccttaactgaaagcatcgaaagtgataaaagatgcaaaagcactatataaattactctatttatttgagacagagactttcttctcttccttttagcctctccatccccaaccttctcccactccaatacccacaccttgtcagggtaatttggtccatgcaatgttagtaaaagtaaaaagcatacttactgaaaagaagtcttcacaatgatttcagtcattatcaaagcatacttataataatcaatgtttatgtatttgaaactttaatgcaaaaacaatttcagaaagaaaagacaaatgcagtaaaaacaaagaatgcagagatccacagcgctcagctactcccaaggcatgcaaaaccaaataggtcctcgtaaatgtgaagaaaggtctcaaaagtcaaagtagggacggtaaacaaaactctccataaagcctaattatcataacccaaataggtgtacctggagtacatatcagtcacacctaactctcagagcactttcctgctcacaaaacgcttttaagagcatttactcattccgtagttaaatgtattgtgcaattacactgcggttatcgtgccaagagccttgcaagccttgtttactcctcacagtaagtctatgataggcactatttttattcccattttacagatgagtaaactgaggtttaaatgccttgcccagggtcatatagctgggaagtggcagagccagtattcaaagacctactgtgactccactgttaaccattttgcaaatcttctcttccctcaagccttctgggatcattatatcaccagataagcttctgacatcaggccatttctgaaagcctttctctgatttttttttttctctgatgacttgtcttttattttttctaatatagaggttgcagagtgatggcctgagagttggctatggccttcagttatgttttgggggacttcacagttttattttttagtcaatgtttaaaccctggagatttcggccgggtgcagtggctcacacctataatcccagcaattcaggaggccgaggcaggcagaccacctgaggtcaggagttcgagaccagcctgaccaacatacagaaaccccatctctactaaaaatacaaaattagccaggcgtggtggtgcatgcctgtaatcccagctactcgggaggctgaggcaggagaatcgcttgaacccgggaggcggaggttttggtgagccgagatcgcacccttgcactccagcctgggcaactagagtgaaaactctgtctcaaaaaaaaaaaaaattcacattcacaaaatgtgaattggagatttcacattcacattcacaaaacaaaaaaatctctgccttcttaatcagttagacaaccgactgcttctgagccttcattttttagatgtgcttctagaggcaactcctgagcaatcccttttacaatgggatgtgttattctggtttgccacagtctccaatgttccctactgtctcttatactcagcccctgtcacccaccagatcaccagtacctgtctgatcccatagcttctgaatttgcaaccctcagattcatatccttgccagttctatgcaaggtgacttcatttgtattgaaaatgcctatcacggtgagcagtaacaaaaatgtcatgttccagcacatctctatatccgtctctcactgtctcttcccccaaaatccagactgcatgtgaagaaaactggggcccagagatctcaagagactggctctacatgtctggctacctgagggtcatgttgggatttaaactctggtatctgaagaaggctggagcccttcctctctcccacctgttcccctcagtcctgcaatttatgccgtgcttccaggatctgggcaacctgctgctgtttccacttgctccagccaaaggtgtttctgcagcagggcctgctccacccttaaaagggttgagaaagagggacatggcaagaggaataggctggaacttgggcatcacatcctacagggggctgggcaggatcccgagtatcacctttgtgaggggtctggcccaggccaggatctcgagtgttctgacaccatcagcaatgggaaggagggaatcactggcctggccacacccacaccacctcttcccctccctcctcctctccccctccatatcccctttcctgctttgcagatctacgtcaatgcacagctaccgcttactcaagaagaataaatccaatgatagtcagttaaatatttgtgcttaaagggataattgcaaaaaaagaaaaaaaggcaaactcctgaaagttgttaaagtataaagtagatcactgggagaaaattgacagaaggcttcatgctcacacacaaatacataaaaatcactcactttgggagaaaactgtacctttaacaaaaatgttttaaattatgcattgtttgttctttccccctagactgcagaagacttttgtgaactatggagaggccacgatgtacggccttgaaacctgcccgaacacctggctgagggcccatgcagtgtggggaaggtagtagtcacagatgttgtagtagtaacaacaaaaatcatcatatcacttttctttatttctacttacacaggttttaaatgaatatgctcttattgtaaactatcaaacaatagagagaatcacctcgataaccccatcccccatctcactctgtacccataaggtaatcattgaaacctagttagtaaatattcctttagactttttttctctacatgtacatcaatatatgtgtgtgaatggaagtacataatttgctttctattttcttatacattacttaggataatttctgaaaatttgatttttcatctaacaatatatccctattttttcatgttggaacatataaatgaacctcatttttggggggggagggacagagtttcactcttgttgctcaggctggagtgcaatggcgtgacctcagctcactgcaacctccgcctcctgggttcaagcagctctccttcctcagcctcctgagtagctgggattacaggcgcccaccaccacgcctggttaatttttgtgtttttagtagagacagggtttcaccatgttggccaggctggccctgaactcctgacctcagatgacccgcctgcctcggcctcccaaagtgctgggattataggtgtgaaccacctcgcccagcctacctcattattttttaaggctcacagtgttccctagtgtggatgtatatccgtttcatttgcttattcccctaaggtgaacattcaggttgttccctgccttgataaaaagttaacggtgtacaaaatggttttctctgtcttagttcctctgttcctctcaacagccttgtgaggtaggcagggtgggtttttattgccctggaaatatgaggcttataaagataaaataacatatccaaaggcatggacattgatatgggtggagcagagatttgaccaagaacctaacattggagccttccccagcaaagtccctcaggaggtagtgagtcaaattgtggctgctaagattcctttgcagctcctctcttgggattctcagtaggtcattgatctcctgatcaggagccactctaatgattagatgaggtcatgagaaagagttagaaacatttaaaaaatatttaaagtaataatttgtcatctttaatttactgagagatacctgaggagcttgattaaaaactgcccattccttggccatgtgtggtggctcacgcctgtaatcccagcactttgggaggctgaggtgggtggatcacctgaggtcaggagtttgagaccagcctgaccaacatggcgtaaccctgtctctactaaaaatatgaaaattagccaggcttggtggtgggtgcctgtaatcccagctactcaggagactgaggcaggagaatcgcttgaactcaggaggcagaggttgcagtgagccgagatcgcaccattgcactccagcctgggtgacagagtgagactccatctcaaaacaaacaaacaaacaaacaaaagctgcccattccatggaggcaatggtcattaatggatgctcaagctgttagaggaatggtcactgggaagctttataaagggagaatgcactgatgctacctgaccccatgtactcatcttagcatctcatatttatatacatgacagctagctatgtgtgtctcataatagcccacagtagggagtacagagtagtaccacctctgatatttcaaaaataaatttgaaacctccatttattcaagccactagatctaatatccatttataggaagcacgggggatagaggaacaagataaatagcatcatgaggaagtcaccaaccaaatagaaaaaataggatatactacaggacaaatgatctggtatcttcagcagcaaacaaaaaattaaaagttgcaaggaaaaaataaacagggcaaggggaatgtagcagtttaaaaaacttaagagacttaacaaaatacaatgtgtagacttgtttggaaaccaactgtaagacagatatttttgagagaattggagaaatctgaatatggactgaatattagatggtataaagaaattattggccaagcacaatggctcatgcctgtaatcccaacaccttgagaggtcaaggtgggaggatctcttgagaccaggtgtcaagacagcctaggcaaaatggtgggaccccatctccacaaaaattttttttaaatagccaggcctggtagcacacacctgtggatccagctactcaggaggctgaggtgggaggatcacttgagcccaggaggttgaggctgcagtgagccatgactgcaccactacactctagcctgggaaacagagcgagaatctgtctcaaaaaaaaaaaaagaaattattgttaattttgtaagacatgatgatggtatgatgattatactttttaaagttattatctattacagctacatactgaattattattattattattattattttgagacagagtctggagtgcagtggcgcgatctcggctcactgcaagctccacctcccgggttcatgccattctcctgcctcagcctcctgagtagctgggactacaggcgcccgccaccatgcccggctaattttttgtatttttagtagagatggggtttcaccgtgttagccaggatggtctcgatctcctgacctcgtgatccgcccgcctcggccttgcaaagtggtgggattacaggcgtgagccactgcacccggcccatactgaattatttacaggtgaaataacttggggtctctggtttgctacaaatacaccgacaaattcagtatgtgtgtgatggggctgaagagatagagaacaagtggcaaaaagttcattgttgaagctgggatgagcacatgtgaattcatgaaattattctcgttaaattctcgttatattcattaaattattcattgcttttgtatatgtttgaaaatcttcctaagatagacagaaaaagatattattctgaagtcacatgtgacactgccaagattctgactcaataggatgatatgagaaccaggagcctgtatttttaacataggcctcaaccaacaaattggttgatactacaagccaattttgaaaagcccttatctaaacattataatctaagtaaaggaacatatttttgttcttttagaaaaatgcatctccaaatttggaataatttaagaacccaaaagaataatggcaataacagagtataagatattaaatttagaaataattaacatgtgtctgttgtgatgccaaaaaaaagaggagaaaacaatatatctctcttaaaaaccagctaataaatttagaagaaatgatacatagacttagaaaaccaccaccttgcaaccaccaatgattcaagcaaggaacatcagtgagtggtaaaaccattggtttgaggaacaggataatcatgccatctcaaagttttaccccacagattacaaagggaaaatgtacatttccaataggagatctggcagtcaccaacaaagcaaaacaacaggatatcatgtgcctcccaatatgatgaaatagaggtacaaaactatcacctctgtagtattcttgctaaaagtgctcccctgaatttaatcacgaggaagcaatcatacaagcccgcaatgtggggcgttctataagacaattggcctatactcttcaaacaaagccagtgtgatgaaaacacactgagactctgtctcaaaaaataaaataaaataaaataattcagtgtgtagctctaacagataataactttaaaaagtataatcatcataccatcatcatctcttacaaaattaataataatttctttttttttttgaggcagattctcactctgtttctcaggctagagtgtagtggtgtgatcatggctcactgcagcctcaacctcctgggctcaagtgatcctcccacttggctagagatgtagccaaatgcaatatacaaaccttcattagatcctgaattaaaaaataaaataactacaaaaggtactttagagagaattgggataatactaactcatttttatgtaagagacttgagcatctgcagattttgaatttgtaaggggtcttggataccaatgaatgagtgtatttaaaatagaaactgtatatatgtataaaatagaaactgtatatatgtatatatatgaagatattgaagttgattttctggctattgcagtcttaagaatttagggtttaagtattaggatacctacaattgactttttcttttttttttttttgagatggaatttggctctgtcacccaggctggagtgcagtggcaagatctcagctcactgcaacccccaccttcagggttcaagcaattctcctgcccaagcctcccgagtagctgggatttacaggtgcctgccaccacacctggctaatttttgtatttttagtagagacggggtttcaccatgttagtcaggttggtcttgaactcctgacctcaacgatccacctgccttggccttccaaagtgacctgcaattgactttcaaatgattctgaaaaaaattgcgtgtgtatgtgtgtgtgtgtatagacgaatattcattcgtctatatatacatatatattatatatatatgtaatgcaatttggggccaaaaattaacaactggtatatttagttaaagggtacatggatgttaattatactattctttcaactttttggcttaaaaatttttcaaaataaaagaaagtagggaaatttttaaaaataataacaaaaataattgtttcaaatagtaaacattcttaagaaataattttagcttttgtttcctccctctgtctgcctcttcctttccttcccaggtacactgtcagcttcttattagtcatcacccagctgggcttctgcagtgtttattttatgtttatggcagacaatttacaacaggtaaagagccctcttctgggcagagtgggggaaaagcagacctcctgctgctgaggctacattagcaaaagtattgtgttaggctcatgggaggagagaacttcatttctactcctagatcagaccacgcttgggagctctctcagtcctgggaatcacattttgaaaggatagatgagctaaagtaacttctgaagagtttagccagggtagaaagagaggcctgcaatcatgtccagtcagaaatcaatgataattgttagcctgaaaaacactggtgacatttactttgagtatctcaaggttgtcatgtagaagatgtctaactatacaaggacaacaagctgccaccttcccctcattgcattcctatcagacattacaaatcaaccacagccttctttcttggctttgtggattagagggagcatccttgtttttgcgcacccaaacagccagaaagaactgtgacaagtattgtagacggaatattcaagcagatggatactgaccaatatttagagcttcccagattttagggctatctaaatttgaagaggatattcttgtgtgatgaattccctttctctggatgtatgaaagaaactcattttgtggagaagaaaaggtttgagtagataacaacctcaaagccttgagattttatgattctaagggtttctggttgtcacaatcatgggcccgacagggttgcccaatttggcaaataataatatatgatacccagttacgatagaatttcagataagtagtgattttgttttactatgagcgtgtcttatgcaatatttggggcatatttatactaaaaagttacattaattacctgaaattcaaatgtaattggtgtcctgtgttttacgtagcaaccacactgcctgtcattgtgctttatgtcagatggtggaagaagcccacgtgacctccaacatctgccagcccagggagattctgacgctgacccccatcctggacattcgtttctacatgctgataatcctgcccttcctgatcctgttggtgtttatccagaacctcaaggtgctgtccgtcttctcgacattggccaacatcaccacccttgggagcatggctctgatctttgagtatatcatggaggtctgtgccatagggaagaaaggatcagggtcctgggtctctgaaacacctggggaggagggtttgttatcatgatgggcaggtgaagctgaggaaggtgatcctctgctctgagcagcccctgccaacatgacatctaggaacacttctgtcccacaagttgtaaaagctaattattatcatcatcattgtcatcaacatcctcatcatcatcatcatcatcgtcacattggataataatgagtcattcaacaaataattactgaataccttctgcaatccaggcattgtgcaaggggccagggactcagtggtcagcaaaaataaatagggtgcctgctctcatggaagctgcatttacttggagagataaacatcaatcaaatcaccaaaaaaattgtaaaagtggtagatggacaaaagaaatacagatgataaaggaattttatttacttggtgccaaattatttacatacattaacttattgaaccttcgcaatactattttggaagtaaagctggcactctgtatccatgatttccacatccatggatctgaacaatcacaaatggaaactattgggagaaaaaaacactaaaaatatacaacaataaaaaatcatacaagttaagaaacaactaggtctaacaactattggccaggcacagtggctcacacctgtaatcccagcacttgaggaggctgaggtgggagggttgcttaagcccaggagttcaagaccagctggacaacatagcaaaatcctgcctctacaaaaaatttaaaaattagtggggcatgatggcttgcacctgtagtcctagctacctgggaagctgaggtggatggatcacctgagcccatgaggtcaaggctacagtaagctatgatcacaccactgcattccagcctgggtgacagagcaagaccgtctcaaaaaaacataagcatgggttatatgcaaatactataccattttatatcaaggacttgagcatttgcagatttggtatccacgggaggtcctggaacattagttctcccatggagaccaaggaacaactatagtatctttatctgcaatttacagacaaggaaattgataaagtaattctttcatgaatttcagactgcctcccatgtccatgctccattatcacagaccacgaaatcccaccattatactttcattttcttgagtgaaagtctctggggttgtattcatttcatattgctgctgtgataaattaccacaaatctagtggcttgaaaaaacacaaatttattttccagtgcttgagtctcgctaggttgaacttaatgtgcggcagagcagcattcctttctggattccaggggagaatctgttctcttgtcttctccagctttgtagaggctgtctgtgtgccttggctcaggccgccttccatcttcaaagctagcagcctcaagccaagtctttctcatgttgccttccctctgatcttccccttctgactccctcttccacttttaaggatgcttgtcccacccgaataatccaggatcatctccttgttttagggtcagctgattggaaaccttaatcccatctaaaaacttaattctccctcgccatgtaacataacatactctcatcttttggggattaggatgtgaacatctttggggaaccattattctacccaccatagaaatctattaacataatcattccccctagattcatgagagctgctatactaactagtggactgcacagccctgaaagaagtgtgggagagacatgttagagggctgggaaacaggagacctgaattcttatctgggctgtgccactaacttgcatagtgaccttgggcaattcccctctcctctgtgttccactttctccacatgtagagatgagcgggctcccagtagccaaagggtgggataatccaagagtccaagtaagtgatgaaaggatgaacacgatttggtgtctatatatagagtggaatattattcagccttaaaaagtgaggagacagtgacacataccacaatgtggatgaaacttgaggacgctaaagctaaatgaaataagccaggcacagaaacaatacatatgataggattccacttacatgaggtacctagaatagtccaattcatagagacagatagtagagcagggggtgccaggaggctgggtagtggggcgttattatttgatagataaagagtttccatttggggtgatgaaaatgttctggagatggataggggtgatggatacacaacaacgtgaatgttcttcatattactgaactgtgcacttaaaatagttaaaatggtaaaatgttatgtgtattttagcacaatataaatgaataaatcatcatatttaaaagattagaaggctgactgaggtctaggtatcttctgattttctctgttgagatcaggtgtgacccagctttctaccaggcaaagatttgggatgacttcgacaccataacaacaccaatgtgcttctcccactttcttttaggggattccatatcccagcaacctacccttgatggcaaactggaagaccttcttgctgttctttggtacagccatcttcacatttgaaggcgtcggtatggtaagattgatggggttcacgcgaatggtccctagcgccctctacagtggccaactgtagttgcagatgtctgaataaatagtatttatgaaaaggtgcagactctgatcttctcctggtgaagggaaagtctgtacccacatacagggtccctactgctctaatataccacgctaagcattgaagactgagaatttactaatcaaccaagactaagtagggcattcctgacaatagaaagcatgagagaaaatgaaaggagtgtggccatgtggagagtcccctttctgatactgggcccacctggggaaggacatttgtgcttgtacgggaaccctctccttcacaatgggccacatctctttctaccttttctttcccaacttttttttttccctccaggttctgcctctcaaaaaccagatgaagcatccacagcagttttcttttgttctgtacttggggatgtccattgtcatcatcctctatatcttactggggacactgggctacatgaagtttgggtcagacacccaggccagcatcaccctcaacttgcccaattgctggtatgtcctgcccacctcaggtgagatagggagagacactggaactgttctggttgtcatagcagagagcacagcaaagctgagccatgaagctggtaatccatcactggaagtgacatatgtctctcctgctcacactgcatcagtcaaagcaagccacatggccgcacctcactccaagggggcagggaagtgcaattctgccatgtgcctggaagtatttggtgaacagcacaaataactgctgtgctacctgatgcagtgaccgtggggattaattggattaatacatagataatgcttagaaaagtgcttagcacgtggtaagcattcatgagcgttagctattatcattgttatgcatccccacagccttcatttttccaaggtgagtaggatgatggtgcatttatttcccacaaatccagagctgtagaatgagaaaaatgtaaccatccccacccaccttgctgtgttatgataatgactagatgagacaataaatgtggagtttctttgaagttgtgccttattttactcaagatatcatcctaatatgctgttcttgttctgggcaatttgggctgtcactagctgccttggacagggcactttccttcctgggacctcagctagaaaacatgggtgttgagctccatcaggacttcacacctgctggtgtgaacctcactagtcatcaggttctccaggaaagccttaaacaaatatcccttcccaataagaaaaagaccaaccacccaatgagaaatgggcaaagggcagaacaggtatttcacaggcaaataaaaaaaaatggccagatggccagataaagagatgctcagaaagatagtagaaggccaggggcagtggctcatgcctgtaatcccagctctttgggaggctgaggcgggtggatcacctgaggtcaggagttcgagaccagcctggccaacatggcaaaaccccatctctgctaaaaaatatcaaaattagctgggcgtggtggtgtgagcctgtaatcccagctactcaggaggctgaggcaggagaattgcttgagcctgtgaggcagaggttgcagtgagccgagatcgcgccattgcattccagcctaggtgacaaaagcgagactcagtctcaaaaaaaaagaaagaaagaaagaaagataatagaaatgtgagttaaaaaataaatacaagggcaaagatgcatgtatcgacacactgtttaggcaaggacatgggaaagcaggtctttttatacactaggacagcaaatgggcaatatgttaacagctattaaaattttaaatcatgtagacttttacccagcattttaacttctaagtttttatattatatgtgcattaatatatgtacaaggatagtctgtgcagtattgtttacttgggaaaagtctaagcccaatctaaatattcattaattggtgactgatttttaaaatgattgcatatccatgcaattgacatatcaaccagctattaaatagaagagccagatctatgtgtactggcagggaacaatctttaagacatactgggtgagacagccaggcgtggtggctcatgcctataatcccggcactttgggaggccgaggagggcgtatcacctgaggttgggagttcgcgaccagccagaccaacatagagaaaccccgtctctactaaaaatataaaattagctggacatggtggtgcatgcctgtaatcccagctactcgggaggctgaggcaagagaattgcttgaatccaggaggcggaagttgtggtgagctgagatcgtaccgttgcatcgcttctcagccttttggctaagatcaagtgagatcataccattgcactccagcctgggcaataaaagcgaaactccgtctcaaaaaaaaaaaaaaaaaaaaaaaaaacaaagaaaaagaaaagaaatattgggtaaataaaagaggagtctacatgtgtatgtgcatatgtgtatgcatgtgtgtgtgtggatgtgcatgtatgttcctacattctgtatgagcatgtacaaacaccaatcatttctagaagggccacaagaaaactctgaatggttgcctatggaaagggaaactagaagctaggaatcaagggtgggaagaatgcttttcactgtatgacttttgtaccatgaattttactctatgcatatattgtcttttttgtttgtttgtttgagatggagtctcactctgttgcccaggctggagtgagtgcagtggtgcaatttcggctcactgcaacctccacctcctgggttcaagcaattctcctgtctcagcctcccgagtagctgggactacaggtgcatgccaccacgcccagctaatttttgtatttttattagagacgagctttcaccatattggtcaggctggtgtcgaactcctgacctcaggtgatccactcgcctcggcctctcaaactgctgcgattacaagcgtgagccaccacgcccggctattgtcttttaaaaaattaaaaaagaagaggcatacattcctgagctgcaggcctactgactcagaatcttcagcaataagcacttttaataagcttcccggatggccctgatgtccaatctggcctgaatcatctaacattagccagttctataattcagtgaaaagtacagattgagtaacccttatccaaaatgcttgggaccagaagtgttttggattttgaagcatttcagattttgttttggattagggatactcaacccataccagcttctgagcagtaagtgagtcctcaatggcccttccggggagccacatcacctttcacatccaattcatgtgtctgcaggttgtaccagtcagtcaagctgatgtactctatcggcatcttcttcacctatgccctccagttccacgtcccagctgagatcatcatcccgtttgccatctcccaagtgtcagagagctgggcactgtttgtagacctgtctgtccgctcagccttggtctgtctaacctgtgagtagcataaaagggcactctttacccaaagctatgacagggagccacgctggcgcccaccccaccatcattggatctgccacttgccttctttgtgacctagggtgggatatttcacctccctggacctcaatttttccacgtgaaaaaaaagggcttaacagaattaccacacagtaaatgttatagtcgtctctactgcctacacatagaaaatagatgctggctggtttgtagaagaagtatcattcattcaatcctatatgtcaggcaccgtactgacattatccaatactgatgatagcctaacaatgtattaccattagagggaactgtggcccagataaattaagtaacacacctgagtcatacacactaagtgacaaagctgggatttgaacacagattgtgtaacaactgtttttcatggtgccatatttcttcttatcataaattatgaacaagtcctgtatcataaagtgagatttaactgtagggaaaaatcccagtgggactgatttgtcagtcttggagattatttatttatttatttatttgagacagagtctcgctctgttgcccagactggagtgcagtggtgctatctcggctcactgcaacctctgcctcccaggttcaagagattctcctgcctcagcctcctgagtagctgggattacaggcacctgccaccatgcccggctaatttttgtatttttagtagagacggggtttcatcacgtttgccagctggtctcaaaatcctgatctcaagtgatctgcctgcctcagcctcccaaagtgctgggattacagatgtgaaccatgcacccagccagagatcattttttggctgtactcttctctcttccctcccttcctttcttcctgttcctttcaattcattcattcactcactcatgagcactgttgtagtgtttgggaaacctcatgaacagggctggggaattctttctttggaacatgtctagacggaggatcacaaacgatgacccatgaggaatgagcaaaacaacaagggatgttttgcctggagaagcaaagtctcaggaaatttccacatttatccttaaacacctgtgggattattgtaaaagtgaagggagaaatttagtcttcaaggctccaggagtcagaatttaaagtcattgaaggaatcaagtttccgtacggggtcaggagaaactatgcaatgcttggagctgtgcagcagaacatactatcagataataagctttaaatggcaggcgttctatgagcagaaacagcaaaatcctacttggtttgaggtgttagagttcccagtctgtgctgagacatcaggaagctgtaaatagtattgtttgtgatcattcctactaggaagggtgtaagttgacaagaaagactgaggagcctctgagtatcagggaatgcatgactagagacagttgaccttataatgacatgtcctgcttttgatatatgctgaaagtcccattcttcatccattattcatccatcaattctattaccctttaccctttattcattcaacaatcatttgttgagcacctactacatacctggcattgtgctagacacaagggatacaatgatgaataatgaagaagatgtagcttctgccttcacaggacctacagttgagtggcaaatatatgcaaggaaataattacagtgcattgcaatgattgttaagatgggacatgataatgcaccatatgatggttaagatcgtaagtagaagacacactctacacataagggggtcctataactcagcctggccgagccagggagtcctctccagtggagtgacacttcagtgaagacctaaataagtagcaaatagacggaggagtgaagaatgtaccacgggaagggaacagactgtgcacagacctgaggcaagtattgcctatggcccctttggagaagtggagagtgctgagagatgaggtcagagctttgtcagggccaagtcctaagggtcattgtgctgaggagtttgggccatgcagagccatggaaaggcactgagcagaggactggcatgaccagaatggagcgtaaggcctttctccattccaccttgaattatagcttttcttgcatgtatcttctctgcctcctcgttgtgagctttcctggaagactgatgctgagttttctctataagcggcttattaaacattggatgaaggaaagctgtggacagggacctcccatcgaaggagaatgcactcctagccatgagagtctatgagtctctcttatgcttggactggatgtgtcagagcaatttcagaaagaggtgatttttttaaagatccagcaagcttgtatggatgctttccagaacaggctttctctattttgttcataggaaaatcatatgattggaatattttaagtaatggatatcccaagtacactgatttgatctttactaattatataaacatattgaattatcacatgtacccccaaactacatacacatagtatacatcaatgtaataattgttttaaaataataaatttgcataaaattaaatcatataaattatatatttactcattcaaacattattgaaattggactcccttggaaaatctgtgatactatatgctcatcatgtgtataagagatggaattttaggagtgtgaagagaagagaaggatgggggttggatagcttaatgctgtctttgtgttttatggcctgcttcattactaagatcctattaagaatagaaaaataagtggctgatattcggacagcagcagaagcatctcccatttttttatccatccttgcttctagacaaaggctatattatatagatactacaaatgttggttctgagcctgggcaagagtcaagcacttattgagcatctactgtgtatcaagttctttcttacacatgagaggcagcatagtagagtgaaaaggaccttagatggggcatcccagtgaattctcatctcagctctgtgtgaccttgaacaagtcctgttccttctagagctctagatttccccatctctacagtggggaggttattaacaggtaagtggtagaagagcccttccaataaagattatatgtaaaaaaaaatccagtagataaaatataaaaggagagcatctatattactagttaagacaggggtgggagttgcctgacctccccaagcctgcagtaggctccctcccacctctccaaagtggtctctcaggtgtctgtgaaattctagggctccaaagcaatggcttgtttctgagcacattcagtgattctaaatatctcctttcattgcaggtgtctcagccatcctcatcccccgcctggacttggtcatctccctggtaggctccgtgagcagcagcgccctggctctcatcatcccagccctcctggagatcgtcatcttttactctgaggacatgagctgtgtcaccattgccaaggacatcatgattagcatcgtgggccttttagggtgtatatttgggacataccaagccctctatgagttgccccaacccatcagccattccatggccaactccacaggtgtccatgcataattatctgtttttattctaatagctctcccttcctcccatccccagtttgacttccatgtggatgttatataccttcatcaaatcccaacatctctatattaattagtggcgtctttatctttccaagagaaatgcagatgagaaaagttagcactgatgtctctcaggctacacctcttttggttttatattttttggatggccttttgtacctctgaaccaaaattagattcaactattcatattatcagcctcattttatggaaaagggatgccacttaccccaatagcccttgaaacagagaccaagcataaatacaaaagtaactgttttctctacactgcagtagctgcccttaaagcatcagatttagaaaagtgtatgttgggcgaagggagttttctatttagatattctaagtagaagagtcatagacagaacaaaaacagaactcagcagtaattttgtccaaccactggctccgccactgatttcctactggccctcaggcaagttcctccccatctctcagtctatgaagtgaacagttggactaactgattattaaggactctgtcaactctgatattctgaaagtgaataaaagaaattaacttatccaccaaccacaaaaactggccatgctagtgttggtgaggaggtggagtaactgaaactccataccctgctatgtggatagaaagtagtacaatcagtttgataaacatcttgtagtttctttaaaacttaaacatatacctaccatatgatccaactattccactccagaaaaaagaaatatatatccataaaaagacttgtacaaaaatattcatggtaactttacttataaaagcaaagaagttggaaatactctaaatgtctataaacaagagaatggataaataaattgtgatgtagccatacaatggaatattcctcagcaaggaacagaaacaaactgttgaaatacacaataaaatgtatgaatcttaaaataaatatgctgaatgacaaaatccagaccaaaaaaagaatacaaactggatgattctatttatataaaagcctggaaaatgaaaactaatctgtagtgacagagaacagctcagtggttggtgcaagatgagatgggtgagagggaggtgttacaaaggagcatgaggaaatttttggaagggatggataacatgttcactgtcttgattgtgaagatggtttcacaagagggtacatatgtcaaaacttatcaattggatacttcaaatatgtggcatttattatatgtcaattatacctcaataaagctgttaaaaatagaatatgaaacatgattccatttttattttttaaatcagttacacacatacagtcaaataattttgaatactcagcacattgtcataggaatttttcaccaagtgggttgaattatgagtaaaatcttacactttttattttatgtatttatatatttttaaaaatagagacagggtctcactatgctgcccaggctgatctcaagcccctgggctcaagcgatccacctgcctcggattcccaaagtgctgggattacaggtgtgagccactgtgcccagccaaaattttatactttttcttttgcttgcctatgttgttgcatttttaaaaaaaataatgcactgatttcataactaaagaaaattcattttaagggggaaagtattaatgatgatttgtttcactctagaagaaatgccacctttaaaaagctttttatttaaactataacaccaatgaaagtataactctacagtataattaatatttgtagagagtatcaattttcaacttcaccttctattagatgattgatattatggcctgaataacaggcatttcagctggagttagcagcattccccctctgtaatgtatcgtccatttaccaatggtcagatgccaaacaacagcctctcagaggagatgtgaagtagctgtgttatcatgaaggagaggtagggaagaatatcctaccgctagatagaaagctatcagcccataaaaagtttctgctcttttgggatccagaccatgaacttggagaaggaaaggctttgaggaacatatggaaaccttactatagaatatggagcaattaaacggaggtaaggcagctgtttatgatttttggggacttatgcagctcactgacattctaatagaagctgtggctcctccttctataaaattcacatatatgcataagttttgcatgcagtttctgaaactatcacaaacctcatgaagtgaatagaccctgggttgcaaaagaacctctggaaaaaaaaaaaggaatgtaaggatttctgcttctcatacatgaaatgatctgcagatgatagatagccaaccctggaacaaaggtctggatgcagaatagagcaatatacaaaaatcagatgagggaggtaagctatcagataagagatcaccatgtaactggtatagaaaacactttctgatgggcagtcagcactgataggacccaaactggtcattccagttgtgcaacacaggctgaattctctgctgccacatgcttctttggcaaaaactgggacttatgagttgaaacagagagatctagaaggatacaaagaatgtgggaaggtcccccaggaccttcagaatcatttgccactgtacttctctactggacaaatatgatttatcttgacatgactgagctggacaatggttggggcataaagggaaatgatatataaaatcaatcagtttaagaagaagctgaattcagatcttcaacaaggccattggaggccaggcacagtggctcacacctgtaatcccagtgctttgggaggctgaggtgggtggatcacctgaggtcaggagtttgagaccagcctggccaacatggtgaaacaccatctctactaaaaatacaaaaattagccaggtgtggtggcaggcacctgtagtcccagatactcgggaggctgaagcaggagaattgtttgaacacaggaggcagagggtgcagtgagccaagatcatgccattgtactccagcctaggcaacaagagtgagactccatctcaaaaaaaaacagaaaacaaggccattggaaaaaaaaaagaaatgggagagttgagattgctaaggaacacaaactgagattgctaagcacgtaagccctacaagtgtggggctagagaagtcacccacgtgaaggtgaagccttaagagatagctacaaagtgatataagtcagtgcacaagtgcagtggtttataagccacagtgccctgggaatggaactgacaggcagcaatctaaggatctataagacttgttatccgccaagtccaggttgtgcctgtctcaaacccacaaaggagctccttaagcaattcccagatctgagttcaaaagggaagaaaaagggggtggggagcagaacacctccctggcatgccaaccccaattgcaagtgaaatttatttggcaagatagactctctcaagggaaaattctcaggtggattcaaacttaggaagttggcttcctggtcagggagacatgggtgaaccaaaagacttctcccgggaggccgaggcgggcggatcatgaggtcaggaggtcgagaccacggtgaaaccccgtctctactaaaaacacaaaaagttagccaggcatggtggtgggcacctgtagtcccagctactcgggaggctgagaggagaatggtgtgaacccgggaggcagagcttgcagtgagccgagatcactccagtgctctccagcctgggtgacagagtgagactccatcgcaaaaaaaaaaaaaaaaagaaagaaaaaagaaaaaagaaaggcttctccccacctctccagcttcttcttgccccaattacaccttttccttccagccacaccaaccagcctttgtccagttccgcaaatgcaccatgcttcccgttgctgctgggcctccatctacgctcttctcccatctcttcacctgcttaattcctcctcattttccagatctcagctatcacttcctcaggaaaaccctttctgacctcagccactaacccagattctgcataaatgttcactcccttctcctgtactgcagttacatgatggcaggtttgtgttggttaatactgagtgtcaacttgattggatacaaagtattgatcctgggtgtgtctgtgaggatgttgccaaaggagattaacatttgagtcagtgggctgggaaaggcagacccactattaacctgggtgggcacaatctaatcagctgccagcacggctagaatataagcaagcagaaaaatgtgaaaagagagactggcctagcctcccagcctacatctttctcccgtgctgaatgcttcctaccctcgaacattggactccaaggtcttcagttttagaacttgggctggctctccttgctcttcagcctgcagatggcctattgtgggaccttgtgatcaagtgagttaatacttaataaactcccctttgtatatatttctattagttccattagttctgtccctgtacagaaccctaagtaatacaaggttcatatctttttttctcaaaatgaaaacttctgcaaactatttttaaaactttttattttgaaaaaagttagactttcaaagggtggcaaaaataatagtttccatgtacccttcacccagctcttactaatgttaacatcttacataaccacagtacaattatcaaaaccaaataattgacattgatgaaatcttatttctggtcctttttctaatccaacatctaaatcggtatctcacaatgcagttagttatcatatttctttactctcttccagtccatgactgttcctcagtctttccttattgttcacggccttggcactttcaaaacgtactggccagttattttgtagagtgtctctcagtttgggcttgtctgatcttttctcctgattgcactgagattgcacatttctgacaacaccacagaagtgacaattgtgcccttctcagtgcatcatattggaaggtacatggtatcagtatgtcttattagtggtgatgttaacttgatcactgggttaaggtggtttctgtcaggcttattcactataatgactgtttttccctttgtaattagtatcttgtgaagggatcttaaaaccatgcaaaatcgtgtttcccatcatacttctgttcactaattcggcattcataggtgtttcttgtctgcaacaactattcctatggtgtttgcctaatggtgtttttttgtttgtgggtttgagatggagtctcactctgtcacccaggctagagggcagtggcacagtcccagatcactgcaacctccacctcccagttcaagcgattctcctgcctcagcctccggagtagctgggattacaggcacgtgccaccacgcctggctaactttgtgtatttttagtagagacagggtttcatcatgttggccaggctggtcttgaactcctgaccccagatgatccacccgccttggcctcccaaagtgctgggactacaggcgtgagccactgcacccagccattttttctatttctatcgttccttctacatttgtgattccattgtgtatgggattctatagtgtatttttagtcagtggactataacccattattgtcattattttattgctcaaattgcccaagatttggccactgagggacattcaatttggttcctgtgtcctttcaatatgtcccccatgttctcattacctaccatatatttgttttccccatcctaatacacacataaaatacttcctgaattactaacttctgcttctgtgaaaaatttgctaactagactctggtatttgtgtacagttccttttctctttctagtatcccatcaaaatgctataacttcttatttttcttgcccacctccttcaatgtggttgtattatgcatctgaaatacagttaagttcatttgttactgtttgtatttcattttgaactctcctcatatcctggttgactttaattattttggggggcatgagaaacattactatggctccaagactcacagttatacaaaatatactcagatacactcggcagtgttccatcccttcctcctttacaccgttatgatttctcccttctttctactctaaacccacctaccatccatagacagctcattactttctggccaatctttccttatttactttgcataaacaaatagatacatgtgctttcttacatctccttctttcttacatacaaagtaccactttctactttttgtactttgctttttgcatttaatatatcttgaaaataactataccgattcatagagatcttcctcattttttttatagctcaataatattccatcatgtgggtatgccattggtgccatggtttactcaggctttctcgtgtatatgaacatgactttgcttccaatatttgcagtctcagtgctgcaatgagtaatcttgtgcatctgtatgtttgtactgttggaggtgcatcttcaagggaaattcccacagtggaaatggttgtgtcaaagggtaaatgcttctgcaatttgttaagtactgacaaattcccctccagaagtcataccagtttgcattcctaccaacagtgatgacagtgtgtttccctatagccttgcctaacagaaatgtgttgttctttctttcaccagtcttagagatgataaatggtatctcagtattatctcaatttacatttctctaatgagttagtttgaatatttcattttaaagagccatttttatatctttacgtgagtatgttcatgtcttttcccagtttttctatcaagtttttggtcctttgtcccttaatttttaattccttatatagtaagaacactaactgtttgtctattatataggctggataaatttttctcccagtcatttgattttattgtgtttttactaagcatttttattatcttcatgtagtcaaatgtgtcaatattttgttgccactggatatttccaccacgtttccttctgtatttatatggcttcattttcttacatttggatcctggatccagatggagttcattcttgcatatggtgtgaagtacaggtctaacttcaactttctccaaggggctttccagttggctcagcaccatttattaaagtctgctttgacctgcgattgaagatgccacctttaactcctcatcccccacccctaagaaacctcacggaacatatgacccaagagcagagcagacataaaaagattaactgagctactgagattcggtcaagaatgtgaactaaaaatgaactgttgagaataaggctggaagatccaacagagggaaacggctgtggaggtcattgccaggtgaggtgtcagatccccggcattgggaagtggtcaactcgtgggttggtaaaaagaattcaccaacaacagtataggtttgaaaaaggaaaggtattagaagaatgctgcagaagactgccatggggcacctcggtgagaggactgaatgtaccacggtggatttttccttagggatatttatggaccttaaagcgggaccgtggggttgcagtgagtttcagcatggcattccggagatgtacagaaattttagttacttctaaggtttttttcggggaaaagaaatctggaaccagatgcctgctttagataataggaaagtctaattacttttaattttccccaaataaggcattttgcctctgcatggcctgatagtcaccaggtggtctttgctcccttttaaattcctcagataaaaagattttgtctctgggacctgttcaatggtcactaggtgatttttgctctccgcagtcatgatgtgatggaaagcaaaatagcaaacaagggagctggatggcgatgaagcagagacaacaagcaagctcaagctcctgcagaagggtccgtccctggaatcacctcggctcacctgtaccgttccaacaaacccttccaaccaaaagagccccaccccaaaaatgcttttgaaatcctgagatgtgatcagtgaaatatgcagccaaggcaaggggaaactgtccgcaagttaaaaagatttattgctattccaggcttcaaatgagcccagaactcagggctggtgtgtgtttcagaagttgttatgatgtaacagggtggtagaaaaatccaggcagtttgatgtcgaggccaccctctcttccttggacccctgctccaaaagcagctgctggtgaggctctttcccatctgcctcattcacccaacaggactccaagactgaggcaggcagccttgtgatccccacagctcacaggtgagaggctgctcatacctctcctagcactggaagagccttgtccttgggaccggacactatggctttggccctgtggagggagaaacggtgccacaggagttgtcttaagaggacaaggcatgcacggtctgagatcagaggttgtgacgtggccacccatgagccagtccgtttgggacacatcacactgcacagctttttaaaaaaataattagctgccaatcttttaaaatggtaagatttcatatacaaatctggatttttggcttctctaggagtaaacattgaaactttttttttgagacagagtctcactctgtcaccaggctggagtattgccagtatctggcagttgtcttcacagactggctatgcactctccaactgactccagtccttgccacccttaattatatttccaactggagaccaggcctcagcagccttgtatcaatgggcacatgtgctgtgactttctgtgtaagaaatatttacattgtaatagcatctttaatcaaaaaggaaaaatcggctgggtgtagtggctcatgcctgtaatccagcgctttgcaaggccaaggtggacagatcacgaggtcaagagatcgagaccatcctggccaacatggtgaaaccccatctctactaaaaatacacaaattagccgggcgtggtggcagggcctgtagtccaagctacttgggaggctgaggcaggagaattgcttgaacccaggaggcggaggttgcagtgaggtgagattgcaccactgcactccagcctggtgacaaagtgagattctgtctcaaaaaaaaaaaaagcgaaaaatcgaaatcaagcctggaagcaacatgtttctcacggttcttatcagtcatttaagtctcttgctaggccctgcgggtacctgagtttgtaaacaacagagcactcctaatatctcccccaagggattcctcccccacacaccctacctctccaggatacactgcaccctagtattaattgggcaaatctagaaaggaaataaaaattagtcacagaagttaagggaggaatagactaagagcaaatacttttgccccttcattgtaacagggggccggaggagaacaaaaacgttaatactctcacttcgcttttaacttagtgacaaaaaaaaaaaagagtgaaagagagagagtcataaagattcttcaggtcctaaaacactctggttcccattccttaactgctttggaaatgaacgaggctctttagagagaatgttaacggggatgagtaacgtggtcagcccagcagatgccctgggctatcaagaactgtccaactcattctcccttaggtcagggctgcttgccccagcctaaaatgtaagtggtacaaaatgattttcagtgagggtagtggactcactgtagaaaggggattaaaggggggcagagagtgggagtttggccttggcaaacacaaaacagaggaaaagggaccttcctcacaccgctccattctgctgtggcagatgccatgttatatgccctttagagaggcagcgatcttgatgcagccc

SEQ ID NO: 3437 - DNA, 1175 bp, Homo sapiens
ggccatcggggtcctcaccgtgcactgcatggtcatcctgttgaactgtgctcaacacctcagccagagactgcagaagacttttgtgaactatggagaggccacgatgtacggccttgaaacctgcccgaacacctggctgagggcccatgcagtgtggggaaggtacactgtcagcttcttattagtcatcacccagctgggcttctgcagtgtttattttatgtttatggcagacaatttacaacagatggtggaagaagcccacgtgacctccaacatctgccagcccagggagattctgacgctgacccccatcctggacattcgtttctacatgctgataatcctgcccttcctgatcctgttggtgtttatccagaacctcaaggtgctgtccgtcttctcgacattggccaacatcaccacccttgggagcatggctctgatctttgagtatatcatggaggggattccatatcccagcaacctacccttgatggcaaactggaagaccttcttgctgttctttggtacagccatcttcacatttgaaggcgtcggtatggttctgcctctcaaaaaccagatgaagcatccacagcagttttcttttgttctgtacttggggatgtccattgtcatcatcctctatatcttactggggacactgggctacatgaagtttgggtcagacacccaggccagcatcaccctcaacttgcccaattgctggttgtaccagtcagtcaagctgatgtactctatcggcatcttcttcacctatgccctccagttccacgtcccagctgagatcatcatcccgtttgccatctcccaagtgtcagagagctgggcactgtttgtagacctgtctgtccgctcagccttggtctgtctaacctgtgtctcagccatcctcatcccccgcctggacttggtcatctccctggtaggctccgtgagcagcagcgccctggctctcatcatcccagccctcctggagatcgtcatcttttactctgaggacatgagctgtgtcaccattgccaaggacatcatgattagcatcgtgggccttttagggtgtatatttgggacataccaagccctctatgagttgccccaacccatcagccattccatggccaactccacaggtgtccatgcataat

SEQ ID NO: 3438 - protein, 379 aa, Homo sapiens
MVILLNCAQHLSQRLQKTFVNYGEATMYGLETCPNTWLRAHAVWGRYTVSFLLVITQLGFCSVYFMFMADNLQQMVEEAHVTSNICQPREILTLTPILDIRFYMLIILPFLILLVFIQNLKVLSVFSTLANITTLGSMALIFEYIMEGIPYPSNLPLMANWKTFLLFFGTAIFTFEGVGMVLPLKNQMKHPQQFSFVLYLGMSIVIILYILLGTLGYMKFGSDTQASITLNLPNCWLYQSVKLMYSIGIFFTYALQFHVPAEIIIPFAISQVSESWALFVDLSVRSALVCLTCVSAILIPRLDLVISLVGSVSSSALIIPALLEIVIFYSEDMSCVTIAKDIMISIVGLLGCIFGTYQALYELPQPISHSMANSTGVHA

SEQ ID NO: 3439 - DNA, 62070 bp, Mus musculus
ttaggggcagggctggtcttgatgcaaggcatcttgcttctcccacattaaggctgagggctgagggctgtcacccaaagtctctccagtgaagcactctcaacactaaagggccacttaggatgtgacttagaagtcagaaaggtctcctgacagaacccaggaacagcatccagaaattaccttaccttcccctctgcggtgccattctttagcctgcctttcctgttatgtatccctagctgcaacagttcctgcccagctggcttccacggaaacaactgctctatgccctgccaatgcccagaggggctctgccaccctgtgtctgggacctgccagctgggtaagtggggagagcacggaggaacatttggtcatttccacgggctgcagggaaggagcgggcacactccagagacaggagcctcaaaggccctaaacatgtcaccatctcccgtgtccctaggccgtcatggtaagaacgccctcattgtgggcatcctggtacctctgctgctgctcctcatgggcatcgtctgctgtgcctactgctgctcaggaacccgactggaccccaaggacaggtaaacactggccgttatgcatgttcctttgggggtggggggggaagggctgaacttttcactcttcagggagtgacacagactaaagcctggaactgcatgtctttctgacaaggaagtgtctgcgtcacatggatatgagcaggggtactgggtggcaggagactcagagtcaaacctgtggcagaaggctgagctcatgatagcgctgcgagggctgggacagaggagaacccacacagctcagcagagaagggaagaaacaagatttcaaaccgtcatgaaagggagggacagagaggtccgagccgtggttttgcagagggaaagacctgaggaatagattatggaggaagggccagtgaggcccaggagttcatcctcgcatctcttggtcccttgggcctaccacatcatgggagtctggaacagggaatgtggtgatggagggttcatttcttcaatttacaaagatgctcaggctcatggggtctcagctgctttgggctcacacggaggccctgcctggctttttggattctctgcccagtgttctttctcctccatcatgctaggaatgagagctggggcttgctcatgctaagcaagtgctctaccactgagcttacctgcagtcttgtttgtttgcttgctttgtgataaaataccttactctgtagctcaggctgtcatgaagtggataccttcattcctcagcccctggagtgctaggagtctaggaatgtgtcaccatattagaccctgatccttgatttggtccgctgtgctgtaaggcattcataatgagcatattggcctaccccctaccctccagaagaagatgaggacctatccaaaggctgtcagagaactctgacaaactgtcactccagtttggagatgcagtagagtgggtggtgaagagtagtattcggccaggatgagagtcctaagagctacatttctgagaaaccactgcaggtatttagtcttagtacttggttctgggccgtgccaaaccctctgtcagatttacaacggaggccaagaaaagtgaaatcagagccgacatggatacccagacctgcctgtctctatctagagcagtggttctcaaccttcctaatgctgtgtgactctttgatacagttcctcttgttgtggtgacactctctgccccaaccgtaaaatgattttcattgccatttcacaactgtaattttgctactccttttgaatcataatgcaaatatttggagatagaagtttgccaaagggatcgcggcctacaggtccagtgatctggagctgtgttgccttctgtgacttagattttggactccatgttttggattttattctgtcatcaatatgcaaagccgccgaagtagatgtgggcacctgaaacatcctgccagtctgacatggattcccttaggtcttgtacactgatcaccctctctttgccacactctcaggcctgagagaaatggggctgcctttttcagaatgaagcagcaggtatggggggccctcaccaacttgggctcggcactgccctgtggctccctcagtaactacaagctaccctgggtgacaggtaagtgggcactgggaatcagggacaggagtctagggctaaggtgggacaaggcttcccatgaggccccatgcctgacctgaaccccctgcagtttctcatcacgatccagaggtccccttcaaccatagcttcatcgagcccccctctgccggctgggcctctgacgactccttctcttctgatcctgactctggagaagaggacgaagctcatgcctacttcgtgccgcctcgagaaggtagccttgcccaccacggtggcaccttctgtgttcctttggcagatgtctgtccgcgcttattttcttccacttgctgtttctggctctgagaacaagttcagaacaaagaaacatcctgtcctcacagagcttgtagtgaacagcaaaaaggacaatgccacgctgggtatggtggcacatgcctttaatcccggcatttgggagacagaggcaggtggatctttgtgagcttgaggtcaaggccagcttggtctacatagtgagctccaggagagccagtagtgtgtaaagaggccctgtctcaaaataaatagaaggatggatggatggatggatggatagagatgtaaaaagatatgtcacctgacagtagaggacagaatgtgtcatcattgctaaaattccttcccagagggagacataagcaacctctacccttctcctaaaatgaaggtcccaacaacatacagaggcacgatgccaccaaagcttgttctgggaaccaataaatttattatgttttcatatagaacataggtaaagggctatttacagggtacgggcgctcctcccagcaataggccatatctagaaggccttcacccatagggatgtgggcttacccagccacatgatgaagccttcctctcctatatattctgcagcttatatattctggcccctccccataggcctcatgcaattaaggtagagttgcatacaacaggtcatcaggagggctgggggctcaggtaaatgcctcttaacccatctctccatgagggggtggaaacagtcagcaaacccagctgggatcatctttttccaagtgcacaggtgaacactccaacatggtagttgctaggctcagaggacagccacaactgtcatgctttagtggggcatacaaacaaaaaggagggactctgaagctacccatgcctggggtaactgggcttaaggaatgtgcctgttagtaatagctgtgtgtgtctaaccaaatcagtaggaattggctaagcgaaaattcggcagtagtaatggtgttttggataaaatgcagtgtgcagtggatcaaagcaaggatgggtaaagagaaaagagcgaaggagaggtatctactacaccagtctctcccctgcctcactcttccctgccacatcttgaggcctctggaaagattagagcagtgtccccggctgaagttcccctgttttctcccctgccagagatggtccctatggcccaagaagagtcaccagaagccagccttcctggaggctccttccctccccctgaggatgcctccacaccattccccattccacgtacctccagcctggctagggccaagaggccatccgtctcctttgctgaaggcacgaagtttgcaccacagaatggccgaagctctggggatctctccagccccatacgaaaacccaagagactctccagaggtgctcaaccccgtcctgaagggcaggaggcggaggagtctacaggcccagagcaagtgaacacagaggaggatgctcctacggccacaagctctggagatcctgccactagtcacggccaacttccacctggtagccagatggtagctgagtgtgcggagaccactgatggaggcatccaggagagctcaggatctgtggccactatctatatgctggcagggacacctcagaaacctgagggtcctgtctggtctgtctttcgtcgtttgggaaactaccagaaagatcagatggatcccaaagtaaagagtgctatccctaagcctctgcgccgatctctgggtcggaaccaggccagcgctggctcagctccaggtgctgtgctctcccaggccatggagtccaccgcagttagaccagaggaaacacccagaggtctgggagatggcattgagagctcagggactgtccaggagccagacgctggaggcagttccctggaacaggattcccagaagcaggcggaagagaaggagcaagaggagcccctgtatgagaatgttgtgcccatgtccgtgccgccacagcactgaggaccttggtgagttcccgggaagcctgtggatggggatgcagggagagcgggatgctgaagctgctgtggaccagattgggctttgtgcctgaaaatgatgccatagctgtgacagactaaacagaaactctgccgtgaaagaggcaagggttagaggccagctggttgtgggtctggccctaggtgggattggaaggcctgagcggagaccaaggtcagaggaaggaggagacggcgacagggcttttcctccattgttctgaattctgtcctgagactattcttttccatctcttcaaaacattttttttttctgaactggaaaacaacctaaatgtttgatgataaagattgattaaacaaatatttcttttagaaaattaattaattaatttatttggggggagagtgtgtaccacaacctgcccgtggaggtcagtggtcaattctcggtggttccttcatcacctcatgagtctagagatagaactggggcctgtgacctaagtggttctaaccatcgcactagccatccttttttgaggcagggtctctcttacagcccgagctgctctcagacgtgctctgtggctgagattgcccttgagtttatgatcctcttgtctatacttccccagtgctggcttgaaccacctgagttgtctgttttcacagagctccatgcatggttaagcaagcatgctaccaagcgagctacacatcagctcagccgaacaagagatttcttatggttggtttctacacagaggctagatacgttattcaaaaatatgtgctaggcagatctggagagatggctcagggggcgagagctctgactgctccttcagaggagctgggtttgcttcccagcaaccacacggtgactcaaagcctggcctcttgaggacatcaggtgtgaagttgcttacagaacactcatgcatgcaaaacacacatacatatgaaatacccttaaagatttaagaacttggcaggtgagagtataaagtcactaacaggttggagagcacagagcagttcctgccatccatggctgtttctttggtgctggagaccgggcacaggctcttactcctactcggcaaatttttttttaatgccagactgtgatggtgcacgcctttgatcctaacacttgggaggcagaggcaggcagatcacttgagttttgaggccagcttggtctacagagcgaattccaggacagccagggctacacagagaaaccctgtctcaaaaacaaaacaaaacaaacaacctaacttaaaagatcatttgctgcttttgaggaggaccaagtttgcttcccatcttggcaactctagttccaggtgacttacatacatttagtcagaacacttgtaaactttaaaaaagatatctttgggggctggtgagatggctcagtgggtaagagcacccgactgcccttctgaaggtctggagttcaaatcccagcaaccacatggtggctcacaaccatctgtaacgaggtctgactccctcttctggagtgtctgaagacagctacagtgtacttacatataataaataaattaattaaaaaaaaaagatatctttggccgggcagtggtggcacatgccattaatcccagcacttgggaggcagaggcaggaggatttctgagtttgaggccagcctggtctacagagtgagttccaggacagccagggctacatagagaaaccctgtccaaaaaaaaaaaaaaaagataaaaagatatcgttgtactatgttcattctacattctaaggtggggttcttttcagacctttgaagtgattattaaattctttctgtttttgaaatagtcttgttctgttgctcaggctgacctggatctcagtacatatcctaggcagccctgaaacacaaggcaatccacttgttcctgttcccctgagtgttgggattataggtgtgacctggcttacaatctttctttaaaaacaaaatgaaacaaaacaaaaacctgggtgtcagctgggtgatggtggcccatgcctttaatcccagcacttggaaagcagagatagtctctgagttggaggcaagcctgttctaaagagtgagtttcgggctggagagatggctcagtggttaagagcatcaactacttttccgaaggtcctgagttcaagtcccagcaaccacatggtggctcacaaccatctgtaatgatatctgacaccctcttctggtacatcggaagacagctacagtgtacttcgacataataaataaatctttaaaaaaacaaaacaaacaaacaaaaaacctaaagagtgagtttcaggacagcccggtctacacagagaaaccctgcctttaaaaaaaaaaaaaaagaaagaaagaaaaagaaaaaaaaagaccaaattagccaaaaaaagaccagggtctcactggataacccaggttggcactagccaggaactctgtgtagactgggctatgtgcctgtctcttcctccttggtgctgagattaaatgtgcgccatcacgcctggcttggactcacaatttcaaatggggcagcagtcatccttctctgctctcctcaatctgactggctttctttactttttgtgtgcggtacacacatacatatatgtatgtgtatacatacatacatatatgtgtgcttcttacacttttcctggcctctcttctgatggcctattgagccttgtgttgttttcatgtggcaaggctgtcttcctgacttatttctttaagacttgccaaaagtcctggaagtctagcctgggcactctcaatttaaaaagaagaagaataaaggctgagctagcggggccggatcgagaaggaaaataaataaataagggctggagagatggctcagcggttaagagcactggctgctcttccagaggtcctgagttcaattcccagcaaccacatggtggctcacaaccatctgtaatggggtctgatgccctcttctggagtgtctaaagacagcttcagtgtacttacatataataaataaatctttaaaaaaagaagaatgagaaggaagaggagaaggagtggtagtttcatctcaacaggactcaaggacttcttgtttcatttgaacaagccacctagcccctcagtttttcatctggaatgtaaggataacggctgtatccagggcagttgtagggatggagtagtagcatgcagtgtaaaagcacccagtgcaagttcagccatcagtaaaggcagttattattgatcctatccagcaccctgcgatcttctgtccttgaacctggtgcttttcacttgctcatgtgttttccttccaggactcatattgggcacctaggactgaggcatgcctgcccccaagaaattcagagccagcgggaaatggggatacagattataaggcattacggtcagcagacaaagaaagcaaaaggcaatatagagagtggccagggaaggcttcccagaggaggtgctgcccaagggagggtcactagcgagagcagcacaaagccagagccacagcagttccccagaggggagcatccagtgggaaatggggaggaggaagcagcatggtccagtcagttggggaacttgaactttatcttgaagaacaaggtaaagagtttctgcgggatctagcaataggtcaggtttatcaaggtcaggtttacatttcccacaattcactgcggggtagatatgtgatgcagagattgatggatgagtagttgtgtcccagggacagaaatgggcagataagataaacaggacaccaggttatcctggtgcagtgggggcaggggaggggcaaggctcacagtagataacattaactattgtgttaaatgtttagttcacagtgtctaacatcattacatgttagtagctcagtagggtgcctttgagccccctagcacgaggcggcagagggcagcctggattacatagccagttccaggatggccagagctacatagtgagatcctgtctcaacacttccccagacacacacacagacacacacaatctgagggagaagggggcactatttatttgaagagggggagggaacattttagatatatgtctggagaaggtcctcaagcagattgcttaggaaaaggattgaagggcttaatctattggcagatagtaggtccaatttggagcttatgagatttctgcacagtaggtcatcaggcccccaaacccaccagcaagcctagaccaagtctgggagagcatgcactagcagaatggctggcgaaggttctgggcaccagggggcgcactcgagctgagggaagctgagtcaggctgctggggacacccttagctctaaagcaagccggctcttgaagtgtggagaatctgagggataccgagtgttttctgaggggaggttagtgcctctcgtcagggagactcggacggacagccaaatctttcgtgctgaggctccattccacgtccaagcaggtcctcagagcagcgcagctccgctgatgatacagaaaggacggagctctttggacccctagtgatctatcgcgctctccaaagtcagacttagactaactaggtgctcgggattgctcacagcatgaagaagggtggacgagaaagtgtgccagccacatgaaagagtcgtttgggaaagtgggagggcagggcatgccaaggtgaccggcctgaacactgaccggtctctgaaggcaccgagaaaagagggcgcgggatggggatggcgacaactggaggaccaggggctcttagtccaaaatcctgactacagacccttaagggacaccgattaaagaccaggcaggaggcacctgattccaggcaaggacccggtgagtcgggagatctagcagggatgcggtaattatgccacgacctgggtcggggtgttctgatacccgtagacagcgcctggataggacaacgggggctaggcagcgaggagcccggacacaaagcccaaggagcaggccgggaaacagcacaaaagggcggtaatggcctgcggagttggagcatccggccctggttctctccgggcgagaacggtggtctatactgcgggccgaaccgcacggtgcttggagcccagctcgctgtggaccaagactccctgaaacgctgacccatgaacttgacaaggaagagggcaacgagaagggcgtggggcgatgcccgcggcggtcaccgggtcgaggggcactccagtttaactgggtagagctgggcctgcccgagccgccccccagcccccccattcctcttgtttgtctccaagtccggccggaaccggcttctgctcgccggggggcgggtgggtagctgctgattggccgacgcctgtttccagccccactcagccaatcaacgggcggcagtgtttttcatcttaggataggaataaaagggctggaaataaaggggacagaaaaggcgccgggcgggcccgatacacactggtaggagccgggtgagctggactcccaggatccgggtctcagacgagggtgcgagaacctgaagccgctcgcaggcaggggttggagggaaggtgcatacttgtcagagggacgacaccgggagggagacgtaacgaaaaaggccaggaggacagagggacgggatccgcttctatggaaacgggctaatcgccggggtaacagcccgacacgggggtcgcgcggttggctcgcgccgccggtttgaaccggcttcgcctctcccatgcggggttcgcgtggcggtagcgcctagcgacctaaacactaaccaatggcgcggcagttcctgtgcggtcccgccaatgaaagcgccgtgggcgggccgtttcggggctccctgtgctgattttgtggttgaaggaacaagcactaaggaagggtctcgagtgcgggcgggcgggagcctgtcagggtccctgggagtggcagctctcaggtgagcctctgctcaggtgaccttactacgagctgcctccctttccggcccccaaagtggctgttcagtcttgcttgggatcaggacccgctccacgtccttgagcataattagcccttttccagctgccatgcctcagtttacctccgagtgaactaagggagaagcctttcctcttggccagcggggctccactgtggcctaaggtagcgttaccaggtagctgcgggtacggggtggcccaggtccctgacagggctagggttcttttcttttgcggcgggcacctatagcctgggctgcaagggactgacaggctgtgcgccagcggctacacgggttgggtagagccaccgctgaagctgaggtctgcgcgcaggtgtctgcagaaccggagcccgaccaccgccacaccgcaccatggcgcccaccctggccactgcccatcggcgccgctggtggatggcctgcaccgctgtgttggaaaacctccttttctccgcagtcctcctgggctggggttcgctgctcatcatgctcaagtccgagggcttttactcctacctgtgtacgaagccaggtgagatgggcgcctcggtcgggggcaggtttctggagtgggtctttgggagagggcggttggtggtgaagatgtaagccagctatgcctgcttgctgcacagcgcctctaagtgccaaaaagcccatttgatcctcatccagctctctgggtgcgtatcattatcatcgtccctgtttgtggatggagaaactgaggctgggacaagtcttccatttgcccaagctgtagactaatagactaatagactcctgcgtgcagtcaggaacgttgctggccttctggtcttccagggcctgcagcattgcttgccttgcaaaaaaaaaaaaaaaaaaaaaaacatgtgtaagaaagaggaactctcataggccggggtgcagcaggagagaggaagtggcttcgcctccacccgaaggaaggttcatctagacctacatgtttttaagtcaggccattatggagtccccttaaaggcttgccaagatagaatttcttgtctatttttgctgctttatgattctccaaaggccatttcctctcctgaactgtgagaacatctcagtggctttcaaaacatcgtagggaggaagaggaagggagacagtggtagaaggatgcttagactctccaggacagactgcaggcaggctgaggctggcccacactacccccacccttccttctgccactcctgtcttcataccctggttgctgtagggtcatcagtggggccgagtcagctgccatcctctccccttcttaggcatccttggtaagaactgcttcttgcctttgtctcttgtctctgccccaccccgtacccaggcttgactctgtaggtcactgctggcatgtcttttttatttctagagtcctattcatttacttttttactttaaattttttcttacatttttttattcatttatgggggccacagaactggatgactgacagaggactgctgtcgatgacagaggactgctgtcgatgacagaggactgcttttggttgttgacactctttttccactatgtgaatttatgaggtcaaactcaggttgacagacttggtggcaagaggttccacgccctgagtgtcatctctaagaagtgggcttgctatttattttattttattttcaaaatagggtttctctgtgtagccctgtctgtcctggaactcaacccctagaccaaacttgcttcaaactcaaggatctacctgcctctgcctcttgagtcctgggatcaaagtgcaccattattgctgggctctcaagaatttttttttccctgagacaaggtttctctgtgtagccttggctgtcctggaactcactctgtagaccaggctggcctcgaactcagaaatctgcctgtctctgcctcctaaattctaggatcaaaggtgtgcgccaccactgcccggctctaaaaatttttttgtctgtaaggttgtttggtcttttgttcttcacaaaggatcttgctatgtagctgaggctagcctttaatttgtaataattccatctcattctcctaagtggtgggctgacaagcctatactgcctcacccagcctctcattcttagcaggaagggaaagccttggacctgctcccactgcctggacccgagtcagttagtcttcacttcccttctctgatctgcccagaggatccttagtgtacagagcttagcaggagaggagaaaggtgggagaaagggagagaccaaaggccacctgggagagggcagaaagcctatcatttataaccaacctttagcctttagcactcaaaaatgtttcctaatagcctaaggtttcttggcaggtctttccccacatcagcaagaaatcttgagagactgagagtcagaccttgttccctgaccaagctttctcttttgcttctgggatgtcaggagattaaaggcccctctgaaaggaacaggtgggagtgttggctctcttttgtgcctttgttacaggatacactggggatttaaaaaaacagaaagaaaaaaaaaaaaaacatcagcctatggcaaagcttttactacctcatcctgaggtcagattttatctcttctcttctcttctcttctcttctcttctcttctcttctctttcttttttttttttttctctttttctttttttctgactcatggcactggtgacatcagattgtccacttttatacaatctctcggacggcatgggcgccctggggctggaaactgttttcctggggagacgctgtcttcttccttcctttgggtgaggggagtccagggatttcgccagccgagcgctgagttggtatttaagcccttgagagacttgaaggtcactcccacaaaccagagtgaaggggaaagggtcaggatcatgggttgaacatcaacttcttatgccgtgcctttgctcctgtgtctgatttgggcttttctgattatctggcaaacgcgctgacctagcatccttagctggggaggcctgctgattctacacagcttatctctccagcctcctggctgtgtggagtcccgggaacctgttgacttttggggccagaaacctctgcgcttccttgactgggagtgtctggtaaagctaaggtcaaggtttgcagtgtggcccaacatcgtcagccctggtgcatggctaagtggatcgctttaggcctttaaagagctgacctgtatacagctgatggagagtcgaatgtcacagctttttgttgtctttaagattgatggtgtgaattcgttccccaaaggaaatttgcctgaacctgttgaaaggtttgggactctagccagaatcgggctacagacacgttgtggtgtgggttccagtttggtggtgtggagagaggaaaggagtcccttacctctgtggcccggcagctttgctttttctgtctcaagggcaggggctcgggagctgggcctgggcagttaatgagttttgtgtaataatacactcctggtaatggcaactagagacctctcttgtccttctggtgtggcaattgagtgtgtagtctgggaagagtggggttttttcccaggctaagtcccttggcttctatattctatgaccaccatagaattcacctgacatgacctcttcccttggtttgttgttgttgttgttgttctttggtggattgggggttgttgtttttgagacagggtttcatcatacaactctagctggcctggtatttgctgtgtcgatcggcttgcctctgcctctttgagcctggtggtgtggggggcatggaattgggaggggaagtaagaccaaccatggggatcaggttgtgcccaagttgcccaagtgggagacctccctaaactttttttttttttttttggttttccaaaacagggtttctctgtgtagccctggctgtcctggaactcactctgtagaccaggctggcctcgaactcagaaatccgcctgtctctgcctcccaagtgctgggattaaaggcatgcgccaccactgcccggcgacctccctaaacttaaggcacaagcttagagggtaatgaaggctgagctggtgttgggagagagccagagtgggatacacctacacctcaaaggggaagacagaaaggactggcgcagaagggagctaatgattgtgcaggtggaagggctgggcagcaaggaaaactggattttattcccaaggcctgaaagaagcccaggaggcagagggctgccagaatccagtgaacctctcagaggcttttgtgaatgctgagggcttgctacatgctgggtgtgaatgtgggtggactgaggatcgaagacaaaaagttccagggcccctgctagacttcagcctagctctgaacaggatcttaggtgggccatgctatgtgtgtgcctgtgaatgctctcacatctatggacgtgtgtgtgcaagtgcaagtcggtgccaggattcttcttcagtcactctctagtccccactccccacctccccaccctagatagggtttctctgtgtgttcttggctgtcctggaactagctctgtagactgggctggcttcgaactcggcctgcctctgcctcttggtgctgggattaaaggcgtgtgccccacctgtcgcctgctccatgggcactttttatttattgaggcagggtctcttactgagctcagagctcacagcttttccatgggttctggggatcagacaccagtgctcaatgtttgcattctctggcctcggttttgtgtccctgacagcaagaagcaagactctcaccactctctggaggactcactgtgtagaccaggcctctctggaggactcactgtgtagaccaggtctctctggaggactcgctgtgtagaccaggcctctctggaggactcgctgtgtagaccaggctggcctcgagctgcctcagcctccggaatgtggtgatgacagttgtgagccacttccctggacttggacttggtttaacttctcccaccccctgtttgttggtttatttatttttttcagtgctagggattaaacgcggggcttcacacatgccggttctaccacttagctacacctttatttagctcacccctagtttattttgaattcagaaaaagtccaaaagaaacagtgagggggataagagcttgtacccacagcctctaagaatgtctcacaaagtgtacccttggctgtccccaccacgctcaccctctcatgacctggtttcccttcctgacatctgttggcctattttgtcttagtgtctcatgaaggtcctatctgctagggttggctttccatgcctttgtgagggagcggagggacagccccattctcaccaggcgataggaagagcctctggtggtgcccagctctttcccagctttgttctcttggcctctctaacccatggggacgagaacatcaccgtcagagtctctggctctgacaatctccattcgagccaggctccacaagaccttccacaagatgcacacctgctccctaatgccacgtgccatgtgtggaatatgggatcagactgagacggcacttggtggccttttacagagcacaggggccagtacccacaggctgcctgcaggaggctgctgctgctgggacctccatgagagggctggcccagtggtactcacagtcaggcctcctgcttgctctgtggctcaggcgacctctcacccacatctctcctgctgggctgacatgctgcttcctgttgccggatagactaaggatggaagagaggcaggggatgctggggcaggtaccctcaggagggctggccaggggtcagcaccgtggaggggaggggctcaggcagcagccagagaaagggctgctgaggaacttagggggtgtctccatctgtgggcctctttgtttccttagcactatcagggaggtgttctggagttccccactctctttgtttgtctggggtgagaggaggactctctctgaccctagagaagtcaaggggagccctgagtggggtcacagaaccctcatgcctcctctgccttctctgttgagattttgtttgtgaggggccaacagtacagggcattgttctcccttccgggctctggcagccgagtcctcttctcagcacactggcacaccagtttcttgcctgtcttcttgtttgccctccctggccgggctagcccgggctgctctgaccacttcatggtggcacctgtttaataaacaggtgcaggggagatccaaacaggctggcctgagctgggttggcgctggcttcactctagactgagcaggggacaccgtggggcttgacactcctagtgttggtccctctcctggctttctgtggccaagtgggaggagagaagacaggagcagcctgggtgtgagtgggcgccaattgggaccgagatgatgtgtgtgactgtttattgttaacagaagtctaggctcctggaaggagcttcctccctatgtaatggacactcagactccccagagaaaagaggccctaactagtcacctaactcccaggtcacttgttgctagacatcactttctgaaggcaagtgagcagaggccccgtggccctgttggcagagatttaagaacagatactggtggcttgaagcattggtacctgctcctgggtgcagtgacattagcataaatgaaagaaggctagacacctttacttccgctgcaggccctcccctcggaaaccctgtgtctagttgcagactgaacagacagcacgtaacttcagataacccgtcctcgtgtgcatacttctactgtgttgggagcctgccagcgccttgggatttaatcttttaaattacgttcagttgtttgtgtgtgtgtgcacgtgtgtgcgtgcgtgcgcgtgtgaatgagcattaaccacagtgtgcatatggtagtcagtgaacaacttgcaggagttggttttttgctttcaccgtagggtccagaggatcaaactcaagctgtcaggcctggtggcaagtgcctttatctgcctacccacatcactggcccattttaggattaaaaattttttttgtaaagatttatgtgttcaaatgttttgcccaaatatattgatgtatagcacatttgtgcttggtgtcattggaggtgtgaagaaagcattgaatcctttggagctggaatttcagtggttgtgagccaccgtgggggtgctgggaactgaacctacatcctctgcaagggtaacaagtgctctaaccactgagccatctctctagctcttagcattttatttttattacactgcaatgctgagaactgaatgcaggacctggtgctgtacctctgagccacatgttagccagtgccttgggattttatcttctgtccatcaagagttgacagaaggggctggtgagatggctcagtgggtaagagcacctgactgctcttctgaaggtccagagttcaaatcccagcaaccatatggtggctcacaaccatccgtaacgagatctgactccctcttctggtgtgtctgaagacagctacagtgtacttacatataataataaataaatcttttaaaaaaaaaagagttgacagaagctgaacctggtagtgcaggtctttgatctcagcacttgggaggcagaggcaggcagatccctgagttcaaggccagcctggtcaacagagtgagttccaggtcaatcagggctacacagagaaaccctgtctagaaaaacaaacaaaaaaagaagagtcatggatggaatctgggaggctctaggagagagtgtctctcaataggctgtactggccttgtgccaccccctgcccaaaaaaaaaaagaaaccctccttcctcccctgttctgtgtcaccaggagctcacggctgttgaagtaactgactgcagactcttggtggccacagtcaggtctctcagcaaacagagtgccctcctccacctgcccactgtatctcacctgtgctggctgccccatccctggatgatgccgaggaatgctcatggctgggcggaggccctgtccccctactgcaggtccagttcctgttctgctggcagggcggacacccgaaaccagcctctctccttccaggagctgcctcacacctgccagccacgggaacacatgggaccagtgggctcggagaaccctgcttgccatgtgtttcggctgtcagtgtggaggatatgttggaaaggggattgaaggtggcaaggacaggagtctggcctgaaaggttttgtttgtgtgagcggtcaggctgttagcccgtggctctgatctccctaaatccctctgtcttcagcttggttctgcatgtcctatttccatatccattttgatccttttggccactggtttctggttctttgtttccactcacttggtaaacagctaagggggtcagggcccacggagatgacactacacagtagccagaagacaattcctagcctaagactcagcccaggatgaactaagcacacacccgtactaccacgtgctgatctggcgctgtgcgcctcgctactgttgagaagctgccatgctgttaaaccacctccatctgagccccaggaaggccgacgctagcaaaagcacacatttgttatttgccgcatgctccatatgcctgttgggagctctagaatgctgttggttttttctcatcacagtccccaaagctctaggggtgtatgctgtcattacattgtgtctcgttcacagataaggaagccagcagagcatggtcaagccgcatttccaaggatataaaacaggaagcaggggaagggaagttagaatctagaggcaggtcggccattgtggttagtcaccccacgtgctttcttcttcagttaccttgagtggctctgagaggccccaagcaggctttgtagacctcagctgggctgccctggcagccagagggctgctactgggaggcagggaggcaggcagtctgaggaagagtttctctggctctttggtggcgcctcgaagctaatcagtaagcttgcttctgcaggattagtcagcaccacctaaggagccgtaccagtccggttcccagcttggcccccaccctgcttcctgccagtgcaggacttcttgtgttgttttgaccctggctgaactttggtgggggcacttatgtgtgcaacgtatggctgatgcagcaggcaatgggtgtcatcgtgggggagggggcagtaagagaagcacctgtcaggaaatcaaaagaaataactctgtgccattaacaaagcaaaaacccacgcagggagtgtatctaagtggtaggtgtagcttgtcttacatacgtgcgggtctgagttcagtccccactccctcaaaaacaggacgggaactccaaccctttgcttctgacttacagtatatggtggtgggaaatgacatatggtgtatgctgcaattgggaagtacaggctcaataaatttgcccagattagctgcggaagaacctggtgtcctggagcaaccagcaccttgtcttatgcaagtccttcttacactggctgtgtgtttctgtggacagaactactgagaatgtttgagacagcctgtggctccacagccaaggctagaccctgagctactgttactaggtgtagagtataggatactctagaatggaaatcacgctggccttgaattcttggagatccatcccgagttctgggattaaaggcatgcacctctaccacctggcagaaatcacatcattttttgagacaaggtctctctctggagcccaggtggccttgtgtatgtgcatgggtgtgctcatgcccactgcatgtatgtatgtgcacatatgcacataaacatgtggagacagccctaggtggtgttcctttgggagccatctaccttggatttgtttgtttgagacaaggtctctcgctagcctagaatttgccgagtaaggttaggctggccaaccactgagagtcaagggtccacttttctctgtctcctccacttgacaccatgctacatgtccctcccctcccctctccttttctgttgagacacggtttctctgtagccctgactgtactggaacttactctgtaaaccagttggcctcaaactcagatagcctcccgcctctgcctcccgagtgctgggattgaagtatccacagcttcaaccctgcttcattatgcttatgtagtgtatgtgtgtgtgcacgcaggacataagtcaaggttagaggacggcttttgggaattggtactcacctgctaatatgagggtgaggatccaatttaggtcatcaggcttggtggcagatgccattacctgctaagccatcttgtccctccacccaccctccctttccacacagggtctcttgtagcctagactgccctcagactccttatctgtggatgactttggcctcctgatccgcctgcattcagctctaaagtacttacttagatagtaggcatctaccctccagtagaatgagaatcctaatctgggactgatgtcgtgtcaaggcacgggtgaaacccttgaaagtgtagacaggactgtgttttttgaggaatggcttctttattgaattctttgactggtctctggtttctacaaatactgaaaacatctgcattaaggggtctgggtgaaccagccacatcttgtcagttgccagagccttaaggcactcacagtgagctttggctttcttggtggtaaaatcccaaaggcgagtctgtgtctccaatctttggggaagcctacctgttctctttctttatacacacagagaatgtcactaacagcacggtcgggggcagcgcagagccggaacccgaggagttgagcctggtgaatggctggctcagctgtaaggcccaggatgagattctgaatttggccttcaccgtgggctccttcctgctcagtgccatcaccctgcctctgggcatcatcatggacaagtatggtccaaggaagctcaggctgctgggcaggtcagtgtgggatccgtgagggctgggtcagcataagtgatgccttgagctgcattccctgctgtagggaaccttggactgtggtagcagtgcaccatgggactccctaaattcccaccctggacaggattactaccgtatctggcacagaattagtagatatcgtgaccctgctgatttccacatgcgagccacaggaccctaacttgtctttaatattagttttgggggccatttaaagatggctcatctggtaaagacacttgccaccaacctgatgacttttgttctatccttggaacctacatggtagaagctggagaactgactcctgaaagttcccctctgaccattatcctcgtgccatggaatgcacacaccaacgcgtgtgtgcacttacacacactaagaaaataaaaaagagcattggttttcaaaggcttctggccttacactttgtccaggaaaaaaatagtcttaaaatatatataaatatatgcaaatgtaaattattaatcatgtgtcctcctcctgtggtgtatgtgtgtgtctggtgtgtgtttgtgtgtgtatgtatatatctatgtgtatgtgtgtgtgtctgtgtgtgtatacatatctgtagtgtgtgtatgtgtgtctgtgtctgtgtataggaggaggagagttgctgcatatgaaattctacctaatgtgtgctggctgggctagtgtgagttatgtgtatacatgaattgtagcctacatatgtcattcttaatagtatgtgctttaaatataaaggctacgattggggctcagtagtagagtgcttgcctaaagtgtatggccctgggttctacccccagcactgcaataaataaataaaattaatcaattaattaaaatgaatgaagcttttgttttgttttgcgaacagggtttctctgagtagccctggctgtcctggaactccctttgtagctcaggctggccttgagctgcctcctgagcactgagatcaaaggcatgtaccactacagcctggcaaaatgaatgaaattttaacaattataaggtgaggctgaggatgcagctcagtagtggagcacttgtgtagcatacaaaagagccatggctcaaatctcagcactgagagcaagccctaatagatggcatcctcctgcgtcatcttcatagctcatgaggcatctctcccaggtctccctagaactgttaaataatgattgtaaaacgttctgaagtgacacacagtaagtacaccacagaactctataacagtagcagttgataaaatagtttctgtttggttttagtgcttgctttgctgtctcctgcttgctgattgcatatggagcaagtaacccagactgtgagtacaccttttctccctttttgccagaaacttgagggaagatccaccatccacaggtgctcactggcccacctgctcttggatgctatgttgggcttggtgtcgcccgtttaagtcagaagggatacgtgtgttggccctcctcgtcactaatctcgtgggcggctatggcagctttccagcggtctgttgcctagggtttagctctttcagatgcatgcgtagtaagagaatgattgtcccaagcaaaggtgtgagaggtgttcccagggtgtgacgctcctgtctcattcccaagccacaaacccagtcctagaccaggccagccacaggacatagccttccatggtgcagatatggtagactgagctatctcctcttcctcctctttttttttcccttcagtcttggggggatgacccagggcttgcaaattccaggcaagcactcttatcatcgagcaaaccgttcccagcacttggacccttgtgacagagatagcccaagctagccccaagcctgcaatccttccttgctcagcctgagggctgggattacaggcatgatacctcacactcaactgagccaagccctcaaggcagcttcggccagtcctcgacaaacagcttaggaacatctcccttctggaccctgtcccttgacaaggagttgaagggctttgagaacaccaccaaactaggacctgaatttcactaatgtcttcaccagcctcctctactggttttcaggaaactggggttttgttgtctgtgaggagctttttgtggccatttgattgctgccaggttaacagaagagagtgggtgtatgtcttttctagaactcaggctccacagggtagacaggagggtgaggggttagaaagagaactctctccaggtgtcatcgaccctcagtggcctgtctcttatttttagctcgtctgtagccttctcagcatggagctctgtgctgctgggttcccctactcatgcctttgtgtctgcccacagcgctctctgtgctcatctttatcgccttggctctgaacggctttggggggatgtgcatgacgttcacttcgttaacagtaagtaccggtttgttaaggaacattttcagccaagtaaactgaatttggggcacatttgttggtttccaggtcctttccttccattcacatatattcttgcatgtcccaagcagtgtgggggctctggttacagtggtcagacagcaaaaccagtcccctgggttccaaagtgggcagctgcgcctcccctggtgacttgcaactgcctctggccttgcctttggcatggaggatgcaggttattaatcatatatccagagaagacgggatctgtcatggctgctgtcctgaggctctccaggaactccagctaacaatgccatttgtagacaaacctatctaagaactaaccagccccaagcttgtggtgcctagggctgagtggcaacatttgtcgcattcttcttgactagggcacagatgtctgcctagataagtggaactgttcttggaactctgagtctactcttcccagggcctccgggatgccacaaaatgggtttctttttagtcagggaggagggttggagggagagctgaaggaagttaaggcatagaagcctctttgccagagggaagactgcagacttgtccagccccagccgggcaggagtatcatcaggcttctgtcaacagggcatcccccttctgtttacctgtgaaggtctgggggtacaccagctgctgttactctttgcggtgaagcctggctctgattttccattgtgctcaagtcaggagtcaagctgttgttgtcttctgtttccttttcctaagctttgctccggcagggaggattagctgtgtggccctatgtctgtggacacggaaagttcactacggtatctgttcagtgaaaaaggcccagcataggcagcctgagtgctgtgccctgggtgtgggtgtctgaggctgagagacccacagaaatctggggctcagtggcctcacctttgctggtgccagtaaggtttgctttgtatctgttggggcattttatttgtttgtttgttttaaatcagatcatttaaaataaaaatagatatattttctattctcataatcccagaggaaaacaaatgtttaaacagtgagaaatatgttcatactgtgaagagtacacagattccacagtgttgtgtaaatgtgaaacaggagtcctgcacaggcctgtttgttcttggacaacacggcaaacaccagccctttttatcaagatgaaaaatataaacctggcatcgcccttgttgttgtagaaatgctggacctctgttagggcagatctgaatttcagggatagcacttggagatggtcctgggatgtgaggagtttaagcaccacgattcaggatggtgcttactcagcatgaggtatgggataaatacgggctgggatgtggctcagtggcagagcacatgcctggcatgaacatgactccctaccaaccctagcactacatctataaaaagagaagagctgggtatggtggtatatgcctgtcatcccagcactttccaggcagaggcgagacagttgctgtgactttgaggtcagtttgggctacagaatgaggccttgcccctgttcccctgaaatgataaacaggagagcagagcagaagcctgttcttgtagtccctaggattagaaggagcagaaggagaaggaggagttcaaggtcaacctcagttacctttcctcaaacagtaacagtatctatccatccttagttacataggaggttcatggtcaccctgggctctacaagaccatctcagacaaaaagcaagggcagatagatgaaaaacactatgtgggaattctgtttaagaaatccttcaagctgggcagtgatggtgcatgcctttaatccaaacacttgggaggcagaggcaggtggatctctaaatttgaggccagcctacaggcaacttccaggaaggacagccaagactacataaggaaaccctgtctccaaaaaccaaaaaaccaaccaaccaaccaaacaaacaaacaaaaaccaacctatgtgtctcacaccatgtattttagcatctgcccttcagtagtctgtacacatccatgtcactctctgacttcagcaatatcggtttgcttcatgtacacaatgcgtctcccatttccctgccagtacctagagctctgcattctttgtctttagagcacgctgttgttcagtcagtgttaccctgtagtagagacagactgtgattcacacagcgagttccccactcacagacattcaggttggtttccagtgcttctcttcttgaacactgttgaaatgaacgatctgtacatgtagttctgcaaaataagttctaggaagtagaatttctgggccccaggattagcatgctttaaattttaatctatgctttcaagccgactcctagactggaatccactgtctgcagttacagtccagcaacatgtttgaaagtgccttcttcatatccctccaagactacatcattgatctttaacacattttttacctgtattcgtttgatttgatttgtctgttgtgtatgtttgtaggcacgtgcacatgaagtttatgtggggctatgaggatggaggatggctttctgaggtggtttcctcaaccatgtgggttctgaggaatgaactaactttctctttctctctctctctctctctggtttttgtttgtttgttttttggttgttgttttttttttttcaagacagagtttctctgtatagccctggctgacctggaactcactctgtagaccaggctggcctcaaactctgaaatccgcctgcctctgcctccgaagggctgggattaaaggcgtgtgccaccactgcccggcgggaatgaactttttttattaaatacctttttatacagtgagccctcttgctggtcctcttctgtcttatttatttttttgtttttttaaagtctcactaatgttgccatggctggcctggcatttgctgagtagaccagggtagttccaaattcacagagtctgttcctgcttcctaggtgctggggctaaaggggtgtttaaatgtttcatcctttaaaaattaggcggtttgacaccataaaaaatgatacatcataaactttttcttttctaataagacatccattctcttacctcttttatattgttataagccctgcctgcttttgaacttaccattttgcccaggctggccttccctcctgaccctcttgctttcccctctcaagagctcagattacagatgtattccctgtccctggccactgtcatcagtgtgtctttttattgaattgcttctttgtattgcttcatttatctcattttccttcatattgctttttcctcttcatactttgtaaaactatctttgaaatacaaataatctctctgtaggagtaaagggtttatctagggccttgagatttctgtatggtccatgaacatgctccagaaaaaatatgcactcagacaagcaaccagtgtacatacacgttctgttcaggggcattgtggaatgtcggttgctttcagcgtcatcgtgtgtgtgtgtgtgtgtgtgtgtgtgtgtgtgtgtgcgcgcgcgcgcgcgctagttggtacacaggtactgtgtaatgcatttgataggaggggatccacccttgtaagggaggtatagggcttgtcctctgacgtctttatcttggacctatattttgggggtcaatgagttgccaccccaggccaactccaaacgtctgcctgttttttataaacaaggttttgcctgaactacaacgtgccagcttgctcatgtgttgtctgtgaatgtgctcctgccacaggggctcttgggctgtcatgacagagaccatatggcccacaaagacagaaatgtttaccgtctggcccttcatggaaaaacatttgccaactttgtgtctagaggccccaagacactacactgctctccacctgaggacagagggtcagtacctcccgcagacactcccacccccaagttgtacaggttaggtctctaagcacttttaaagtcaccttcttcacccctcccccagctggaggagctccctggacattcccttgtcccgtgagccttctcacgggacctgagagctcatgagagtcaaccctgagagggaacaggaaatgggtcaccgaggacagactgaggctcttaggcaatgtccctgggctgctgatgctttctgctgagcagagctgaatctcattctgacacagcacaggcctttaaaaaagtagagccctcaggaccagctcgcagacacacaggccggcagtgcagtggcactttctttctgtttgtgactcccgtccatgttttcattttggagacaaaagagttttcaaggttgcctttagaactccctaaatcaaatccataaggacttttaaacagaatggctctgtgataacctgggaatgtcagggaatgtgttgtcagggaaaccttcaattggggactttctcaggcccgagggctttgtatggcatggactgtgggctggtacactcattggtggagaaggggccccaagttggcaagatgccttttcctcacaatccagaaggaggtgtcccatagcttcccccacctctcacctcccaccctcccccctcacagagccttgggagtctacactctgtcctcctcactagagtcctttcctccagtgtggaggttccaaggctatccaactgtcatggctgtttagctcaggtctcttgcagcactgggcctggggatcccagagggaggaacacgccaatccattggtgcaagcacacacccggtgctggagagccttagcctgccctggacatctggtcagcacactctggtctgtttgctcaatgtctctagtttgtacagccctttagttcgctccgtcagctgaagcacaaacatcggccagcggctgaggtggcgtctttgggccgacaccccacaatccagggcctgggttgcttagagatgggaacagatgcagccaaaattgtgaacatatcttttccacttcattaccctgacccttgtcagtgtgggcgggatggggagttctggtctgaaactcttatggaagagtggttacaaaatgttcagggggaaaaatctctctgtgggctttccctattttattcattggagtttggctttaaacatgaggaataaatgacctcaggggaattagattgctgtgagtaaggacccgagggacaggtgtggaagcaaatagccccctgtgagcggatgtgaggccagcagccatcctgcgaagtcctattctaccaagtagaatttcatctgcctccctacctggagagcctaggtaccaggcaggtaaaactctcccggtatcagagcagagcccacttagcctctgattcccatccatatcttgggaagccaaagcagtcagtggatggccatcagcctgggggatattggccattttttcagagggcttctacgtgataaatttgctgcacatgacatgtgcagaggttgacaggaggcagtgggggtgtcgccagggatctgggcttggcaggtggaatgggaggtggcagggagaaggcagttttccctccccacccctgtaccagtgaagcggaaaggtgaccgcatgggcccatgatatgtgctgagggctgcctgcttgtttcagttagggaatggctcagctttactgagtccacttgtccagactagttcctgggtaggtagtctgaacaagagagatggactggatcctggcctatgcagacttttctgaactcggggtgtatataacaggcagctgaggacaaagcttatctccttgaaaggaccacagacctagaatgtcacccactgcttggctctgtgacttcattagagagtcagagagtaccctcatggtgaatggattcaggaggccttagatatgaaaaaaggactgacattcatcctgtctttgcctctcctgggggttcctgtgaaaagacgcacacatctttggatatcttagggtccctaaggaagatggtctaaactgtttttggccatggcctctggggattcttgtccagtggcctgaactccaggggaggggctgcctgcagctgctgttttcccctctgggaatgtgacacagctgggcctgtttatggtacagctgagggactgagggagagtgagtcatctgggcgagggaaggcctaccatgaggcccaggagctcaggcacagaggacaggttttacttagcagagtggaggcagcaaagtggctgcgagaagaaaccaggagctgggagaggggcttaggctgcctccccgtgtgtgcctgggagtcaggaggcaacctctgcggagcggagcggatcgttccccctggcacctgtccccgcagcatggctccagcttcctatttggcagcagagctggttttcccctccagcaggccctcgaggcctcactaaggcagtcagcttaacactcagacagcactaactacatcaccaccatctcagcaccattacatctgacagggctgggcaggggcaggaggatagaagacagaataagcaaggagagacaagactagtgagagaggggacccagctcgggaagacagacacagggcaagttcgtatacaagcacacatccctgtgcggaatggtcctggatcacaggtgtcagctgaaggcagaattgaacagaggctggtagatctaagagaagcatgtgaagggatagaagaatccacagtgagcggaatcagacaggatgctcaataaagaatacccgaggaaagagacaacatttgaggggaagtgacttgagatccaaacagcaagagtttcgaatcctaagattgaccttgcccagcttgagggagtcttttgacccttaaatgttttgtgtaactcaggctggcaggggtgaccatgaatttctgatccttcctccctccacctcgggaggggagggctggattacaggtacgcaccacatgcctggtttagactctgaaagttttgtaagtggtgaatgggcaaggaacagttgctttcaggattttaaagatatagaaagcaggtgctaaaaatagttgctattagtatacatgctctttactgggaaggaaatctgaccacactgctcccgagccaacccgcgagggaaatctcctgcaggcaggccggcctccggctttggaaagaggagaaggaccccgcctgagggagagaacacaattagtgttaccacttaggtacgagtaaccaataccaccaggaaactttccctgcctttctgagtcttaccctctcctgagccctctgactattgctgggatgtttatgttttgggtttccttagtcaaggtcagcctcaggctccttgctgagcagttttgtccagtataagccctggtagccctcaagccaaaacaggcgtggactatcttgccctctctctttcccacagtttttgaaacagagttaaattattttaacacagactggcctcatgcttctaattctcctcctgtcatttcataagtgctaggactacagaaatgtgccactgtacccagcttcattacctatttgaaatatgtctttttgtttttttggtttttcgagacagggtttctctgtatagtcctggctgtcctggaactcactttgtagaccaggctggccttgagctcagaaatccttaaaaaaaaattaagagcagggtggtggtggagcatgactttagtcccagcacttgagatcagcctggtgtacagagcaagttccaggacacccagggctacacaaaaactctgtctcaaaaacaaaattatacattaagaggaaattagatgacaaagaaaaacatacttatatgtggtcatacagaatgcctgacttttatttttaatatatttttactaatttttttagtttggtatacaaaatagtaggtcttattaggacatgctcatatgcacatgtaactgtgcctcctctggctttcctcctcatgtccttcctcctcaaaaaccccttccagtgctacagactaaacctaggacctcacacggtatgcgaggattctaccactgagccgactctcagaccacaactgtctttacgagtgaatctttgtagaaggcttaattcgtcttttttccaccctccatcatctagattactttgaattaattatcagtaattaattctatccatatatgcaactaaagtgtgtggtactgagtgcggatgtgggctctagcatatgccaggcaagtatgctttgaagcaagagtgttggtggagtggctagtgttgaaggtgcacacactgttggtggggtatcagctggcacatctctcctgtaagacagtttgtcggagtatggtaaatcctagaaagtgcattcctttcccttagcaattcttgctttgctgcggggattttccttgagatggcagacacctaacctccccttcatcctgaagactcgtcactgagctgtgggaggcggtttcatgctccagatctagctgctttaggaggctgaggcacgaagaccgtgagttcaaggccagcacagctaatttttttctgtttttctgagacagggtttctctgtgtagccctggctgtcctggaactcactctgtagaccaggctggcctcgaactcagaaatctgcctgcctctgcctcccaagtgctgggattaatggagtgcaccaccaccgctcagcccaacagctaatattgtaagaccttgttttctaagacaaattagtcaggtctggcagtacagggcctgtagtcctagtgacttgggaaattggggttgaaagatctctaagttaaaaaagcctacctaggctgcagagtgagttcgaggccagctgggacaaatcagtgagaccctggtttaaaaggagaaggcaggctgtagctgtacctctgtggtaaagcacttgccaaacctgtgcacagccttgcgttacagttctagtactgagccccataccccacgactgaaatcattttatgaataaatacaaaaagacttagggtctaaaaccagagacctggtttcctaaattatagaccatccaggtaagcaaatagtaggcagtcatttcagattgtgtcaggaaggaagaggaaactgtttagaaaacactttataataatatatcaggttagaagggaaaaggtgacgcatgcctgtaaccctagttcttaggaggtagtggaagagttatctctccagcccctaatagcaagtttgaagctaacctgggctacgtgagaccctatcttaaagataaaagcagggctggtgagatggctcagtgggtaagagcacccgattgcttttccaaaggtccagagttcaaatcccagcaaccacatggtggtagctcacaaccatctgtaacaagatctgacaccctcttctggtgtgtctgaagacagctacagtgtacttacatgtaataaataaatcttaaaaaaaaaaaaaaacagtgtggaggggctggagcgatggctcggtggttaagagctctggctgctcctctagacgtcctagtttgatccccagcacccacatggcagctcacaacatctgtaactccattctcagggatccaacaccttctgacctccttaggttcctacacacatagcaggcagagcacccatacacatagaataaaataaaatactaaccatgtggtagtgcatgcctttaatcccagcactggagtggcagaggcaggcagatctacatgagttcagggctagggctgctatacagagaaaaccctaccttgaaggaaaaaaaaaatgaagaggaaaaaaaaggttagttggatacagtgttcagtcctgtagtctcagctgtttgaaagaccaaggcaggaaaattacctgagcccaggcgttcaagaccagcgcgggcaacatagtgcaactacttttattttttggtggtgcacaaacacttttatttatttatttatttatttatttatttatttattacatgtaagtacactgtagctgtcttcagatgcaccagaagagggcatcagatctcattacgggtggttgtgagccaccatgtggttgctgggatttgaacttcagaccttcggaagagcagtcagtgagctgagctatctcaccaactacttttaaaaaaggaaaaagttgggctggtaagatggctcagcgggtaagagcatcttcagaaagtcctgagttcaaatcctagcaaccacatggtggctcacaaccacccataacgagatcggacgccctcttctggtgcatctgaattcagcaagtttgaagctaacctacagtggtttggtttggtttggtttggtttttggtttttcgagacagggtttctctgtgtagccctggctgtcctggaactcactctgtagaccaggttggcctcagaaatccacctgcctttgcctcccaagtgctgggattaaaggtgtgcgccaccactgcccggctacagtgtacttatgtataataataaataaacctttgggctggagcaagcaggaactaagtgagtggggctgaccagagcaagcagaggtcctaaaaattcagttctcaacaaccacatgaaggctcacaactgtctgtacagttacagtgcactcacatacataaaataaataaataaatctttaagaaaaaaaaaaggaagtctctaaagcagtatgttgggctggtgagagggctcagcggataaaggtgcttgttgccaagtgtggtggccgacgttgaacctctaggatctacatagtggaaggaaagaaccaactcccatgagttgtccttttgttccaaatgttttttaatagctatgcattccttttctaactaggaaaaatattcataatttaaaatacaagacatagatgttggcgggaagctgtctaatgtggcttgccctgaggctccctgatgccctgggagtggcacactgaccaaaagaatgtgagttttcttggttcggtaacactcttccaggttggatgctgggtgtggtggcccatgccggtaataccagcattttgggagactagggtggggggagtgggggtgtgaaggggggggaagcaagattgaaagatcatagcagaccttgtctcaaaagaaatctgaagaggagtgctccaggctgggtgaccagagggaaaattcaagtgctgccattgatcccgcccagggcacagggttgcttcatgaatgggtgaatctgctcttttgtccctggtctggtttggtctgaggaggtcagagcagggctgcagcctccacctcaagccctgattacaccagcctctgtcctgggtaagggttaaggcaggcttgagacaaagaagagagaaaagggccgaccaacccagggtctgcttctgcgcagggctgattctgctgtggggaattttcttccctaagggcatggcagccatgtgcgcctgagtgctcagtgttctcctgcttgaccctgcctgaaggacaggcgcttggcttcagctgctcttctgaccctctgatcctttctccgcttgtctcagctggactagaatcccctgcagttgtatttccctctttctacataagcaggtatcatcttttgaatatcctcagggtggatgccttcctacaagtatgccttgctgcctgactatgtgcctttgggaagtgagtgtgaccttgaattacagcattccttccatgcaggggtacagcgagcacagttacctttcgtgcccaccagggcgtgttcatgcatacctggccttgtcacggtgtcctgtctcctatgcccatcatgtgtgcccttcccacgcttctcagtctaaaatgatgacaaaaaagccacttgtgtgctaagaatttgggagaaaacttagctggtcaccctggccttgtaccatacacttacagacttgctaatgttccttttcagccctgtggtacccccccccccaacaatcttgcttcttactaatattctgcaaagcattactgactgagaattcacataccacccatttcacctaaagcttgtatattcagtgagctttagtgtatttagagatgcgtagtcacttcagtcacctacatcaccccaacagaaatcctgtcccatgtgtgccccccctgccccccccctttgcctgtcactgatgcactctttgttattttgggtttgtctgtttggagcatttcatgcaatggatccatataacatatgcttttaaagaaaacattatttattttatgtgtaaaggtgttttgcttgtgtgcatgtatgtgcaccacaagcatgcagtgcctgtggggtccagtagagggcatcagatcccctggaactggaggttgttagctgccatgtgggtgcaggaaggagcagtaccctccgggtgtgctcttctgagctgcctttgttctctcttagcttactgtctcccaggtccacacctgttgtagcatgtctgctctcctttctgtaattgtgtatataccttttgtttatctgttcatcttgatggacattaggttgttgccattttttgctattaagaagaatgctttcccaagcattcatgtgcagcatatgctcatatttctcttaggagtgaatgtacctaggagtggaatgccctgatcgtgtggttattttgttttaactgtgaaaaaccagctctgtttccagagcggctgtagctttgtatttctgcgggaagctcatgccacacctcccggttctctccagcacttgttactgtctaacttagtacagccattctagtgggtgtgagtgtgtgtgcgtgtgcgtgtgtgcgcgcgtgtgtgcgcgcgtgtgtgcactcgtgtgcgcgcgcatgcccctgtggaggtcagaggacaggtgtgagaggtgcctctcttcttcccccatgtaggtgccaggggttgagctcaggttgagagccttggcagtaagtgcctttacccaggagccaccactcactcagtctgtctgtctgtctgtccgtctataatttactgaggcaaggtcttactctgtgtccctggctgtcttgaaaattgttatgtagaccttactggcctcaaactcacagagatcaacttgcctttgtctcccaaatgctgggattaaaagtatgcactgcctctctgctttgtttgtttgtttgttttaagactgaaccctagttggcctgaaatttactatgtagaccaagctggcctcatacttgcagtgatcctcctgcctctgcctatcttagagcatagacatttacgaaaaaaaaaaaacaaacaaacaaaacaaaaacttttgacatattcattgctcatttatttaatcaagagcaaaacaaggcaaaaataatgtcaggcatagtgtcacagctacccccattttggtagcaaggaatgggcttgcagtggccttctctagtcttgctagggttttgctataagcctctgctggcctaggactttgagtcctctttttctgcctgagtactgggcttctgggtatgctcaagctacagtcacgacgattaaacaaaaagggccccagacaataagaaaaggagcattgctcaagagaatgtccccagcaccaatagcactgttgatgatgacgtggtacaggctcttgagctgggagaggagttgtggctgcttgtgggcaggatttggtttgctccggtgtgttggaatccatccctgagcttctctgtgtagccctggctgtcctggaactcactctgtagtccagactgacctcaaactcagagatcagcctgcctctgcctcccaagtgctgggattagaggtgtgcaccaccatgcctagcatttttttaaagctattttatttaatttgcatgagtggtttgtctctgtgtataaatgtatgtatatggcacgtgcagtacacagaagacagaaggggctggagttacggatgactgtgagctaccccgtcagtcctgagaaccaaacccagatcctctgcaagagctttaagcgcttgtaacttgcgagcagcggctccagcccaggttgtggtgtcttagcacgggcctgtaatcacaactgagtttctgcagaatcattgagggttggccttgaaatcatttcagatgggcccaatcttgctttgcacccatgcgagtggtcatgttaaaaacagccagagccttcctaatctttgcttcctggaggtgctaggtggctcccagggtagcatcaagttggaacaaatcccctggttacactcaaaaactcagtcaggacttggggagccacctgtcttgttaggactgtgattggcaccttccagaaacatactctgaaaaccaaaagcagcttttgctgacatctggtctttctgggactctgatatttttatttataaaatgacactcatttccccaaatagattcttatttttaacgggctttctccctttgaggggtgcttaaggtttacagctttgctctctgacagcctccttcaaatacagcaactgtggtaagccctggcctgtgtaaggagtggcggggcagtgtgcagacagtcatgtctttttctctgtctctgtccgggaagggaaaaagaaagcttgccattaatttgtggcagttgcctagactgctgtgctgtgaattccacagaggagggtggctgagacgtgaggcctggccattgctagctgctcccttcccttctcccttaggcgaggccaacagcccaggacagctataaatgtactccaacacaaagtcataaagcttacctaggaccttcctggcactcttgtaagctcaattgcgtagttctttggtatgaattttgcagatgagagtgttgcgtcacaatgtcaaaggtgagatgcacctgtgacctaagcctgcctttctccatccatcccctcagctgcccaatatgttcggcgaccttcggtccacatttattgccttgatgattggatcctacgcttcctcagcagttaccttcccaggaatcaaggtgagggtgtggccagcccgtggctctccacctcccaactcacgcttttccctagcatctgggcagaggcctccacctaggccactgcagcctctctgaagaggtctgtcattgtgaacactaggggtggctcctcagctgcccctcccacctaggcaggatgcacctggcaccacaggagcaagaaaagaaaacccctgggccccggaagaggggagcttgagtgttgttctgtggtgtgtgaccccagactgcctggggacaggaaaggagggtgggtgagcttgcctccaggacactccagcctgttgatgttgggctgttgctgcccagtagccagagctctgctgtccgccaagttggttcagctgtttccctcccaggcagaattctgagcctgtggaagtcacatggcatcaggaagaagcctaggctcagagtctcctaggcttctgtcaggaggtcaccaagggctcttctctccccaagcactggcatcaagtagaagcccacttcggggggtatggggctctgtgatgatgagagggggcctcagatgtaggctgggaacctgggggtccacgtgctaggtggtaggaatctggccagccaccctgtgaacttcctcttgctcctggatggtggcagaagcagacgctccttggcttctgtgtagaatgctagcctccgcccagggagctgggcaggtacatgctaaggcacttagaggacctcacgttgggatgaaatggggatgatcaagacaggcctaggggcatgggcctgtaatgacaactactgagaaggctgaggcaggagggcatggaacgttcaagggcagcctgggcaagttagtctctacttatctcagcttttttaaggaccatgagtaaagttcactgttagatagttggcaagcacatgggaggccccaagttcaatttctggtacaaagaaaagagctgggcagtggtggcgcaagcctttaatcccagcacttgggaggcagaagcaggtggatttctgagttcgaggccagcctggtctacagagtgagttccagaacagcctgggctacacagaaaaacactgtcttggaaagaaaagagagtagggaagaggaaaaaaaaaatagaaagaaagaaatggtatcaattggtgctggaatgcttggctctctgccctctgccaggatcaccactaatcctgctgaagcactctccaagtatagcatcaatacctgtttcacagaggcaccaaaggagctaagtcagttggtctcctgagtgtctggagcacctgccctgtgtatacttagagaagtatcagtggatgagaccggcaggttcctgtccttggggaactagacagtcaaacagaatggctaggctgcctgtgatcccaacactctggatgcggaggcaggaggatcaagagtttgaagccagccagggctacacgagaacctgtctcaaaacagagggggaaaaacactcagaagaagcagaaaagtcttagccaggactgtttactgtgacccagcaaggcagacatgacagcaataactcagtcacctttcaagatggtgacatttggttcaaattggattctaggttcagacaggttgggattatcagagcatggggttctaatagccaaacagctcagctcacagggttgagcctctctatatggcccagcacagtgagagctcccaactgtcccctgcccaatgcccattctggtttcccattgataacactgctccctcttctgacagctcatctacgacgctggcgcctccttcattggcatcctagtggtctgggctggctgctctggcctggtttttttcaactgtttcttcaactggccactcgagcccttcccaggcccagaggacatggactactcgtaagttaggcatgctctctgccctaccctcacaccagccagggaccgggcagcaacctacaaacacccttcctatggctgctagggtgaagatcaagttcagctggctaggctttgaccacaagatcacagggaagcagttctacaagcaggtgaccacagtggggcgccgtctgagcgtgggcagctctatgcggactgccaaggagcaagccgccctgcaggagggccacaagctgtgtctgtccactgtggacctggaggtgaagtgccagcctgatgctgcaggtacccaaaacatgactgtccctatccaggttggcccaagagacccgggggcagggggagggtagctgcatttacactgcaggtctagcccacagcccccttgattggtaatcactgactgagactctgggtatcttctcactgcatacctattctgtcttaaagggggagagggacctggttacactgagttccgcagagcttagggggtctgctgatgagcatcaagaccacagacctcagcggggctcttcactgtccctcacctccagcatagtccacacactgagccttcgtcccttccccaggccctgggtgctggatgggccatatttcctgaacctgagctttatgccttcttcccacagcggccccatcgtttatgcacagtgtgttcagccccctcctggtgctcagcctggtcaccatgtgtgtcacacagctgcgacttatcttctacatgggggctatgaacagcatccttgagttcctggtcaggggggaccagaagacaggtaagtgtcccccactacacacacacacacacacacacacacacacatacctctgggccttccttgatgcgtccctccagggtagggcagtgctgctactctcaccagcccaataaagccctccgtcccctccagcttacgtactttgtgacctagatcacatcagtagggctgtgaagttgccgtgtctgaggccctgctggcttgtcttgtcacggccagcttgactgttctttcatgtccccatcagggttttcccggctaaggagggagaggactgaaatagcgctgtgtttcgggtgtggggtgaatgctttcagtgccagtggggagggctgcgggctgtctgctgagaacacgacccagagccgaagacagcagcccagccccacccgtcacatccctgatccaaagggactagcttggcacttggacaacctgggggctgagggaggacctttgtcccgactgaggactacgggtcagtgggggcccactctatgatcgatgtcctgccctgggaaccagggaaaacagaggcttcccaggcacgaagtactccagttgaggcttgttcactctgggaaacagaactgataacccacaggaaaacagtagcaggtcttgagctgacgaggggctttgctgcgcagagaaagtcaggacttccccaggcctggctgagtcagctttagtcatcctgagcaagcaggacaaacacactcggtggcaaatctttgttggcagtctcaccggcctgccactttcttttgttggctaacttgtttttacccagggaaagataacgcagtccttgcaaggggccaaataccagttatccgcagggacaggaaggctggctttcacagagggaaaagctcctggcaactaatggcttctcagaggggagaagtggaaagaagccgaatgtaatgagcaaaaaaaaaatcatgatgggccttggtaatgacctcagggccttaggagcagaagaccttaagctttgtttaatctaatgatagttccctaacttttttatttgtttgttttggttttggttttggttttggttttgttttttttcttttttgagactgtttctctgtgtagccctggctgtcctggaactcactctgtagaccaggctggcctcgaactcacagagatctgcctgcttctgcttctcgagaggttgcaggatcaaagttgtacaccaccactgcctggctataatttcctaactttatacccctggaacaattttttttttttttttggtaatatagggggtcttgatggtagagtgctttcttagcgctcatggcacttgcaccacataagttgcacagcgatgactgcctgtgatcccagcactcagaggtggaagtggaaaggcaaggttcagagtcctctgaggttgcagggcacattggaggcctgcatgggttaggggcagtagatctagatgagccttgctcgctgctgtttagcctctccaggtacctgcctgctttagtctcctgtagctatgactacaagtgtgaaccaccctacctagtagaacattttttgtttttgttttgttttgttttgttttgttttgtttttgagatgtggtagactaggctggcatgggacttacttggtagacagggttggcttcagacagtaggtggtcctcctgtctcagcccgggactggaactacgtcacacgcagcttaatcttctggtatttcactgaaataaaaaaactttttgatgggaccaactcagcaggaagagatgcttgctgctagcgtggaagtagcacacagtggtcaggagttggttctcttcttcccctgtgcattcaatatccagcactcaggtggcagaggcaggtgaatctctgtgggttcaaggccagcctggtctacagagcgaattttatctagggtagccatggctacacagagacaccctgtcttaaaaaagacaaaacggggggaggagggggatggaaatcctgatacactcccacaatctcagggactaggcagagtgaggcaggaagattatgattttgagtccagtttggctacacagtaaaaccttatctaaaaaaacaaaacaaacaaaaaaagtgtcagcttcaagaagtagagagctcaggagaagaagtctggagtagagtagacaagcactgtattcccctagtctccagcatccagtactcacaggcctggctctgctcagaagggctgccctgggtcagggagctgaaggaagaagcctggctgtctagggagacttgtggtgtcagatgactgtgtgcctggcacagatcctctgacctttccttctctctgagtgcagtgacagggcagctctcccacgggccacatggtagaactccgcttctgccaggcctgctgcctccagcatgctacttcatcatggtgcccagaccagggccacaggcctgacacaccagcatgcccatgggcagcagccaggaaaagatcagctgggctggctctctttcacatctaaccccagagctggtgtgagcaaggccttcgttgagtgctctgggggagagggactcttgggaagtggggtatgtgttctgagctagtctgtttgtttcctgtctcattcatgtcttctgccactaacccctctcctttctgcttttccacctttgtgctcttgctgaagtgatggcgactggtaagccaggggcgttgtcagggaacgttacaacacccctaagtactctctgcccagcccagaggctccttccctcacatagcaaacatccctcttgactaaactggtggggtaagggtaggacactcagtggtcaacgatttttttgttcccacctctataattttaagtctctttgaagatagaagccctgacgtctgagtctctgggaacagtgccttcctgggggcagaaaaagatagtcagtcacatataaagccctggttatggacactggtgatattgtggtttccaagtcagagtgacttcctgaaactttggagggtgggtcattgtgacatgctggatttcagtagctgtttcgggggaagcaacagaagcttggagcagaaaattggcctttgttctagctttgatttgagaagttaaggtctgtaggttccctgcaacccacagtgaccatgatgctccaaggcagacatctgaggacccatagagtccactcaagctgctccccagggccgtgtgccagagctcccgtgacgtgtcctattcctccccagttgccctctatacctccatctttggcgcactccagctgctctgcctgctgacagctcctgtcatcggctacatcatggactggaagctgaaagagtgtgaagatacttcagaggagcctgaggagaaagaaggcactcagtacgtagaccacagcctgcttgcagccctcagagaaagacagccgagatagatattaggcagggcctggagggcaggaggggacccttgcaagctcggcacccattgtttccacctctgtggacatttcctgatatgatgacgtttgggagatgctgaggtagataaaagcagaggagactgaggaccgcaggctggcactcacatcccacacgtgggcctatcttaaagccacttgccactggggttgttccactcccttgaattgtagcctactctaatcgagtgtgctaacgatgtgctgactatgaaaataaaacaaggctctggagtcctgctttatggaagggctgggctctgagatcagaggatgagttaaatgctgttgtctacaacccccatcacatgataggctgttatttattgtgtcaggcccagtgccaagcatttaacacacaatgtctcagttcagcttcagtaccatgatacaacgtgtgtcagtgttgtacccactttacagatgaggggaaagggctaggtgcttgagccttctttcagaggtggtatagttatgtaggcctgggaactgctgccctcctttacacatttgctgttccttcttatgatcatccgtggggtttcagtgtgggtggcgtggctggaatcagtaatagttaatccacaaggaaataatgacagagactctctgttatctaggttaggccctagagccaaaaggctatttgccatcctggttccatctgctgtgtatttgtttcccctcaccctatcctgccctgcaaggcgaaaccagtgtactcccttatctggcttattatctggcttataaccagcttcctgcaagctatgggtacactgaggctttgccggtcctcctggtcctcctcgcaggggcactctctgctcctccccatccctgccatcagctgagctcgataagcagggttgggagggtgggggggggggggtgaggagggggaggtggtgtgggggtggtgaagctgtcttctcagttgtgagagcttctattcgaatcagcctccactcaactgagacagcagcccagagagtgtccctgctgctgggctaagatgtggttgagtgacctgggatcagtccacatactgggatccctgaggtctgactttttggagagagcctacctttccccagggagccacccccaatgccaccctaagtcctgtgtgccctttctctacagaggtgaaaagaagcagaaacgagacaggcagattcagaaagtcacgaatgccatgcgggccttcgcctttacaaacgtgctgcttgtgggttttggggtgacctgcctcattcccaacctgcctctacaggtatgtttggggagagggaagataatgttggggatgggacacaaatgagagggttttcgtggctaaaacatgcattcattcttagttcattcagtttggccagtattcgctggaggtctacttagcctccgccactccccagctctgggctcgaggaggagcgtgagctgtgaaccccagctttccttcacaggactcttctccaagaaggctctttgttcttctctgtcctcaggcaccttgcctgccatgggtgccaccatcttctgtttcctggaactggttggttttgcattttctcagacagttgaaatctgatgtctaaagaggtttggccaaggctgagtgtggaggtgcacgcttgcagacagtgactgggcctggcttggtgtcagggttcaaagggttaattccttcatacaagatttctttcgtcttttcagacagagtttctgtgtagcccaggctggcctcagacttgatcctcctgccttagcccttcaagtgctgagattacaagaacaaaaccaccatgctttgcctgcacacgatttctgagttttctgaaacctgacttgctggagtttgtaagccaagtagactttgcacctggccccaccctttggtctgtgaaaatgttctagcagtccgtctgggcccgggtcccaggtttacaaggtgacgggatgcacctgatagcattgcttccagcgggacgtaggccaagtgcatcatcgtctcacgccggctctggagacgaagaggctctttgtttacgaggtgccaggtgttgagctatgttgaacacacaggtgtgacacccacaggcactatctatcacacatacgtgctggtactgagtgtacagaccagaagaagccctgggagacctgtatcagttctaggtggggagatcctcacagaccatcttgtctaatgggtggaagatgtaatggaagacagtcactgctctttgtttaacgcacttttcattgaaggccagttttgaaaaggcagcaatgcatttgaaggaagagacagggcctgtgtaaatccacatctgcatggtctttcaagagtatccctggcccctgcactatccatattcctggaagcagtacctccacacaacacgcttgcatgcgtgaaataaatgaatgtaatttttaaagagaaaagcttatcccagcacccgggaagcagaggcaggaggatctctgtgatttcaaggccacagaggtccacatagcgagttccaggtcagccaggactaaccctgtctcaaaaaacaaaagaccttaaaatatatttttacctacatgtgtaactctgtgttgcaaaagtgagaaattgtctacaaaggccagaagagggcatccggttccccagaccgtagtcagctgccatgttgatgttgggaattaaaggagatcctctggaagagcaggcagtgttctcaactgctgggccatctccctagcctcaatttacattattttaattatacaaatgaggacccggagagatggtcagtggatgctcttatgcaaggacctgagttcagttcctagcacccacatggtgactcagaactgtctgtaactctggttttaaggaattttctgaactctggcacaaaggtacacacatggtgcactgatacacataactgaaattaaaatatatgtatttttgtgggtctgtggttatcagggtgtgttctaatttttttttaatgatacaaagtgttttatcaagggttaggcatggtggtgcataactttagtcccagtactgtggaggtagaggcaagcagatctttgtgcatttgagaccagcattgtctacatagagagttctagggcagccaaggatacacagtgagatcctgtctcaaaaaacaaaaccaaacaaaccagataaaagaaaacaaaagagcggtctacactagagagccggtaacatccaactccaggtggctgccattgctgtgcccgggtctccagagcccaagggcagggacagaggcggtcctgagggtctgctgctcacgctctgctctcgctccttccctcccccagatcttctccttcgtcctgcacacaattgtgcgaggattcatccactctgccgtagggggcctatacgctgccgtgtaagtcctggaagctctgggtggtgtggccttaacctgaggggactgctggtggccctgaaaccctgaaactagcctatcctgacctgctggcatgtgtgatgttggatcaggggacatgaactagggtttctgctgtctgtgtcataacaggccgtcatccatacctgacagcaggtgagtcagtaggcagacagttgggtgcccacaagccttggcatttcacacgaagccagcctctcagctggggtcagtgccttcgagccccaggcattgctgttcggccaagtcctggcactgtccctggctgctcactgggtcagggctgggttctggatgcctgaagcgaaacactgcagtgtaaatagccctccacaggggcagtgaattgagtaaccggtcccagaaagccctgggctggcctcacccaggagcctcagagggccacttgccggccataacctccttggaccccagctagtgaaacctacatctttcccaagaagctctacccacctgctcctccctctattgcccagggcttggcccacaaattgaaccgagttccatcatccaccatctgtgactgtgaatatagcccctcgtacctccctggcagagcctggtgttccccgagattaaggccagagctacttccctctttaagcctcatcctacagggtcattccaggtctgcctgtccccctcgttgtacccccctcccgttccccaagcctggaggaagttgtggctgccctggcagggtatgagggagtcgggcaggagctgtgatgctgagtttccgtgattgtgcaacgctcctggaggggggggggggggggagacagcagagccagggtcagcctccaacccaagccacagactctgctggcaccatgctttccaccctgcgcagccccacacccacaggctaagggcacatctgagtaaaggagaggcttgctccagagtctggagcctgaggggcctgaggctgataccgcctctccctgcaggcaccagtggtgcagccctggttaccagtatacctaagccaggccagtgagggactggggaagcctgtcacccgtgctggctgtgatgggtctcattgccccaacaggtacccctccacacagtttggtagcctcactggactgcagtccctggtcagtgcgctctttgctctcctgcagcagccgctgtatctggccatgatgggtcctctgggaggagaccctctgtgggtaagaagggtcagggtgtctctccattctgctcctgggaagggggcccaaggacaacaggtagtgtgggaacgttggacagtacccagtcaggggtccctggtggatggtgaccgggaaggaggagaaaactggcctctctggatccgattctggggtgaattccaggctttccatccaaagcattctcatccaggtgtcatgagttgtcccaatcccagcccattccctggaggccgctgaggagcattggggaaatgagatgctggaatgtgggttgacagctgggaccccttgaacctcctctttagttttgagtcttttctgtgtgacgccttcccttccccagacctgcgtgtgcgggtgggcgggcgggagggtgctgccttgcgtgcatgcagctccctctcacagccaactccccaccatcccaggtgaacgtgggtctgctcgccatgagcatgctgggcttctgcctgcccctttacctcatctgctaccggcgccagctggagaggcagctgcagcagaagagggaagacagcaagctgttccttaagatcaatggctcatccaaccgggaggcttttgtgtagtgcccacccaccgcctcagttgtggcctcctgcctgtgcttcagtgactgactgcagtcatctccccaccccagaggacctcatgctctccctggatcctgcccttcaccacactggagcccatacttcctcagaaccacctggccctgccgtggagtgctggtgtggagggacaggagagggcctgggacaagtgaacctcccactgccagaagctgggctgccctggcctagctgtcaccccaggggctctggagtctcccgatctccatggggcttgtacctggagccaaggggaccttttcagcgagcatttctttctttttattttttctttctctttctcactgatcggattctgcctcttgccaaagcagaggggcctgccatcctccagcacactacctgtccctgagctgcacgcccaccaaccacgcccacctgaggacaaaggcttgcgctgtctgcactccccttgcttggccccttacctcccctggccagtctggctgcctgaggaaggaaggacccgcttcctgttgttggtgctaacccctttgtcatcccaacacccccctgcccgtggctagtctctggcccctcttttccttgaaagcctgagaagaagccccccctgtctcaggctggggaaggagtggagggcagactatttacacaaagcctcaagagccctgggccaggcttcttcctccggagccagagcagtgtctctctgctggcacgctttgttccagtctgcaacctgaagggaactaaggggacaccacaagggcaccctcccatccacccacagctgtttttctggggtggaaataaggctgtgactagacatgaggagccaagcctaaatagggaagaggattagtgagtaacccgaggggtgtgtgtttatgtggtacgtgtgtgtgcatgtgtgtatatggtaggaggctagccccaggggctgcttttatcagagtggaccagaccagaagccagccagccctacagcaggctcaaaataggagtcagccttgctttatgatggggacctgtgtgtatcggtgtgatcacagtgccccctgctggcagactcacatcaggggactggaacggttcatgtagtagaagcctagccggcctgcctggctcactaacccaccttgccttgacaacccctagaaaccctgcctgagacctcttggggtgccaagaggggtacattggtttttaagtttatggttttctcttgttttatcatgattctttttatgaagcaataaatccatttccctgttggtaatggatgcccctcctcacgtatcagctaattactgtatgtgcctattttatatttgagaggagagacagggcaaaagggtctgccaggaagaaaagaaaaaagaagccagacatagtggcacacattttaatcccagcatgggaacctgaagcaggcagagtttgaggccagtctagtctacatggagaattctagggctacatagtcaaaatctgtagatgttctgctagtgacaaacccagctacacctgggtgacatgtccaggaaggggcatgggcaaaggaaagccctgtctaccctgtccagggaaatggggctgtggagaggtgtgggctgccctcactgctgtctgttgcgactagacagaccaatccagagagagccttcatctccactgttggctgttaccgtgtaagcccaagggttgttatatggtgactccaggaaagtcctaggctaactagcacccaggctaactgagatgccctcagtctcagtgcaggccctgttgtgagagtggactgccaggtcttgactccagtctgttcaaacagtaatcacataaccccaacagtgagctagtggaagccctttgaggcttctcatggctcagtggtagagctcactcttaacatggctaagaccctaggttctgtttcccaagagagctattgtgtattttccaaaccatctctcagaacacttgtctgtgaaaaggtctagtggggtacgctgagttaaagtcagacctgccacttcacagcagggatccacagccctttccccatgttcctgagcattggagctgggggtagcaccaggtgtagtgtcaggaggacctctttgagttcaagcccagcctcctgtacatttcgagttccaggctagccgggactattcaatgagaccctgtccaaaaaaaaatccaaaaacctgtttgcaaggatgtggagaaaaattggaagttttaggcattgctgtctgagtggtggagctgagagctgtggaaacatggcacagtcccgtaatgccagcaccaaaaggcaaagggtgacatctttcagcatgagctgcaaccctgctcacacacaaggttgtgacatgctgagtggtgacaaatcatagccatgtgcgacatggtggctacttggctgaaatgtggattggctccaggcctgggtgtggatgtagctcagttggtagcatgtttgcctagcttacccaaagccctgggtttgaataaacctggcatggtagtgcagcacttggaaggtggtgacatcaggatcaaaagtccctcttggtcagatagtgagtttgatgccaacctggaatccaagaactctcatcttcggaaaaaagaatgacaaaatcagatggcagaccactggtctcacctatgtctcgatttgattctggtgctgcccagaggttaagatgcccctgtgaggaagagaagaggttgagggaatgtcccttcctgctagggatatagcctgcagacacaacctgtgcagttcccagcaacactgaggggcccacacttttgatcgtgatgctgtaagggtatatatcctaggattgagacactagaaaactaaatgtgggatggaaaagagccaacggtactggaagatgagagacgtccactggtagcagagaacaggtgtggcaagccagatgagctctccctaatcaagggccatcctgcgctgacttggcagacatgtcagtgtctttgaatcacggtgacagcctagagtggtatagatgcttggagaagcaaccccagaggactctcctgtgggtctcaagtcactaacacagccgaggctgtctcagctagaaccccccccccccccattggaagcaaagagcccaaagggtgcaagctcagaatggtttccatatcttggagccaatgctttctcaggtttgaggcaagctatttgcacaagagtcacgtgagctctggaggctgatgggtccttgcaggaataatttccctgatctcttcaacctcaagaagagttaccccaagataggcacagaagcacaggctagacacaggctagaggcaccgatggaaggaacaggaagcgatgccagccttgtggttttacccgtcaaggacagtctcaccagaagcccctcctttgtggtcttggcgttcatcaaggatggattcccctgggactctacccttacgactctgccgggacctattcacagctggctccaaccttcattaaagccaaggtacaggccctcgggaccacctcctgtgctctgtcccctacacccacatccagaagttctgatcaaaacttgtacatagccagccagtggtgctggtgcacacctttaaccccagctctcccctgctcaaagctcagcgcttgtctccacagagcccagccacaggggctgttatagcctcaacactgttccctaggaagggcagtaaggtagttgtgggttttatggcagtgacagtgccttatctgtgaagctactaggcacaacctaaaattgagtaatatacatatatatatatatatatatagagagagagagagagagtattgactcagctgtgtggaaagagcacccaagggttacaggagggctggcttctcctcgggctgtagctcttccctggattgagggtcaagatgaggctgtgtccccatgctctaacctgccttgggccctagagtgtggacagagcctcctgagctgaggagagtccgtgtcctctatgaggaaggtatcatggctctgtcagcacagccaccaactatgccccttggtccctgcagtgagtcattcttccatggatagatccaagacaggaccacaggtcacttcctaaccttgactgttctctgaggggaggcatgtgggttagcagccactccacattctcagggaaagctcctgccatttcctcacgtgaaatggaggcttctgtgctctcacgaggtggctaaggggacctgtaggtaaatcgcaagaacagcagtgtgtgtagctcacagcagaaacttaacaccaggaccctggagaaaggcagacagcacgggagccaggcacccccccccctcctatgacaggaccctgacacaaggggactgaccatgtcagactggtggccagataaagatggtactgacctcagtctcttcagaagtcgtcttacagagaagccttaagttccccccttgcctacttttctattttgtccttcacgtttttggtaagaggcttggccaaagagtcttgatgtcaaaagtcccagcagcccgtaccgcctttttgaatgactacttggccaggctgtgtgtgtgtgtgtgtgtgtgtgtgtgtgtgtgtgagagagagagagagagagagagagagagagagagagagagagagagagaggtgtgttggagagaggtgtgttctggtgtgtctgttgagagagatgtataagtgtgcctatgtgctgtaatactgggaggcaaaggaaagggccatggcgtccctttctgttaccaggagcatctaggcaggtcagaatgcaggccacatggaagacccagaccaagccttagagtgaggcctgagggtgtgttcttcagttcacggggtcacatcgtgtcactgttaactcagcagctggccttggctcttccctgtcacttctactgttcctagcccccagcatactccttggcacacagtaagcacttaataaatgtatgctgagaatgatgaagaactcctctgtggcttccatgtctctttctgcctggatcacaccactcttcctcagactccctgcccctagtgagcagcatggttctcaccgctgctccagtggagggggcctgaagctcaggagaggggacagtcagaggatgcagagcagagatgctaggagacaaggcctgcaagcttggaaggtgtctgccccccatcttttgttgtcaccattccccacccccaccccactttggatggagtcaacctcttttttttggatggagcagacatctttttctctggtatgacctccacctcaagggcaaaccaagacttggggactgcagcccccacttagagagacagccaattactgtcagctggaatgtgccccatggggccagatctgatatattgttttcctcctgagaagttaggaatcctgagttttctgtaaaatatcactcttttcatatgttagctcaccagccgctttttgtgttttaaccctgtataggccagtgtgagaggagatggaggtgaaggtcccctgcctcacaggacgccagggcctccagccatcccataggtccagcaaacattgcctctagcatcatagggttttttgtttgtttgtttgtttgtcttgcattttatttatttttaatttttaaagatttgtttatttattatatctaagtacactgcagctgtctttagacacaccagaagaggccatcagatctcattagggatggttgtgagctaccacgtagttgttggggtttgaactcaggacctttggaagagcagtcagtgctcttaactgctgagccatctctccaagcccatgtcttgcatttttaatttcatctatttatttctttcccagcctggttcataagaaatgttattcagagacagcaaatgggttaaccacttgaatctaattcctgaggtgcacaaagtctgatttagtgacagacttgtcatagacactcagcagcttgccctcaggtctgccgactcccatgcccagttggatcatttgagcagccagaatcatgagtaatgggccatttgtttctttttgtagtactggggacagaactcagggcctcaggcacgctaagagcctcaccgctgagttccacctgcagcctggctgctctttgtccagtgtctgtctggaccttcagaagcaatgttccctgagagctggcacaagctctgtcttggtcatcacgatacctccagggacttggcctgcgctggtgtgaaatagctgcccagtaaacactgtggggatgacgtttaaaaagacagagccaggtgtggtggtaggagcctgcctgtggtcccagcagctgaggcaagaggagcaggttggaggatcaggagtttgaggccagcatgggctacagaaggaaaccctgtcttaaagccagagagaggaggagtctgggaagcagactagctgaccagcccaccctggcccactaggcggaggcagtgcagaagatggaaacagtgaaactcagtctctcagagatacaaagagattggttacaggtgtggctgtagcggagtagtatcggagactagccagccacaggggagactgcagggcctgagccaggagatccagagacacaaagatgaagggggtgaggggtggaggagaggagacaggcccaaagatgacagttgcatctgataatgataaagatgaagataaatggaaggaaggcagaaggtatgttccccagagtccagtgacagggacattcagtggggagggtgtggggtggctcctgaaagagagacacaggaagaaaggagatgatggggctggagagatggctcagtgagttccaggacagcgcgaacacacacacacacacacatacacacacacacacacagaggaaaggaaaaaggaaacaaagtaagtaaacaggggctgtgggagaggtggctcagagtggttaaacacacttgctgcactcacatgccaaagacccaggttcaggtcccagtgcccacatcaggtggcttacaaccacctataactcctgtcctaagggatccaacacccttttctgacctcctcaagaacctgtacacatgtggtatgttacatatacttagaaatgcacatacatacaagacaaataaaattttttaaaaagatttatttattattatatataagtacactgtagctgtcttcagacacaccagaagaggacatcagatctcattatggatggttgtgagccaccatgtggttgctgagatttgaactcaggacctttggaagagcagtcagtgctcttacccgttgagccatctcaccagcccaaataaaaattttaaatgatagttttcatcattgtaattatgtatgtgtacatggatatgtgcaggggaatacagttgctctcagaggctagagatatcagactccctgaaactactaacttatgacttacctgacaggggttctgggtctgggaactgaactcaagttctctagaaaagcagccagtgctctagcctgaagagatggctcagtggttaagagcaccagctctccttataaaggaccagagttcaattcccagcatctacatggcagctcacatctatctgtgactccagttctgggggaacctgatgtccttctctgacctactttgtaccaaaaccacagtggtacatagacatacatgcaggaaaaacacccgtacccagaaagtaataagataattaaaaataacatggactcatcagctgcaaacactgctttagctacagaggttcctctaatgagccactgcaagcccattatgcaggcatttatcactgtcctcgttttataagtgaagaggttaacgtgcccagtgtcaggtaggaaagtgttagggctgggactcaggcatcaggcccctgggttgtctgttgggaggaagctgtagagagtggggcactggggcaccgttacagacagtgtggatcatacatctggaggcctgtgcctggagaaaccaaacttgctagggtaaaagtgatctaggaaacaaagttcagggtctggtggtgtggctcagttgatagagtgcttgccctgtatgtataaagccctggttcaatctccattactacatagatcagttgtgctagctcctgcctgtcatgttagccctcaggaggtggaagtagcaggattagaaaaagcaaggtcagactggagagatggctcagcagttaagagcaccgactgctcttccaaaggtcctgagttcatatcccagcaaccacatggtggctcacaaccatctaaaaaagggatctaatgatctcttctggtatgtctgaagacagctatagtgtactcatatacagaaaataaataattctttaaaaaaaaaaagaaagaaaagaaaattaaggtcatccttggctacatagtatatttgagttagcctgggctacatagaagagacaaaaacagtaagacttaaatatataaaacaaccacagggattttatttactgaatttctctaaaacactcacacacacactacaaatttagaaggggacattggaatatgatctgcagaagagataatatagagaaagtaaaattggtcgggcagtggtggcacacgcctttaatcccagcacttgggaggcagaggcaggcggatttctgagtttgaggccagcctggtctacagaatgagttccaggacagcagaaaagtcctgtctcaaaaaaacaaaaaaataaaaaacaaaaaacaaaaagaaaaattggaacctgatgtggctgttcttgcctataatccctcactcccgaggcaggaggatcacaagtccaggcctcaaaactagttcaaagcaaacctggactcaagatggtgagaatctatcatgctgggtggtggtagtggtccaagcctttaatcccattactctgaaggcagaggcaggtgaatctctatgagtccgaggctagccctgtctacagagcaagtttaagaatagccaagacagagccgggcgtggtggcgcacgcctttaatcccagcactcgggaggcagaggcaggtggatctctgagttcgaggccagcctggtctacaaagtgagttccaggacagccagggctatacagagaaaccctgtctcgaaaaatcaaaaaagaaaaaaaaaaaaaaaaaaaaaaaaaaaaaaaaaaaaaaaagaatagccaagactacacagagaaaccctgtctcagaaaaaaaaaaaaaaaaaaaaaacaggaaaaaaatgtttcagggctggatgtggtacataactttaattttttttgtgagtatttattttaattttatgtctacatttgaatgcctgcatgtatatatgtgtacagttgtgagtgccaggtgctcatggagaacaaaagaagacatcagcttctctggaactggagttgtaggtagttgtaaactactacgtgggtgctaggaactgaatccaggtcctctgcaagagtagcaagtgctcttcttaactgctgagccagctcttcagctccaaggcacacaccttttatccttagcacttgggaggccaaggcaggtggatctctgagttcaaaggtcagcctactctacatagagagttccaagctgccgggcgtagtggcacacgcctttaatcccagcactcaggaggcagaggcaggcggatttctgagttcgaagtcagcctggtctacaaagtaagttccaggacagccagggctacacagagaaactctgtattggaaaaaaaaaaaaaaaaagagttctaagccagtcagggtcatataggcctgtggcctgtgtcaaaaaataaatgttaagggatgtaacaacatgggagagtttacatgcaagaaacatggtttctaatcccagcactcaagtttcaggacagccagggctagacagagaaaccctgtcttgaaaaactaaagagaggggctagagagatggctcagcagttaagaacactgactgttcttccaaaggtcctgagttcaaatcccagcaaccacatggtggctcacaatcatctataataagatctgatgccctcttccgaggtgtctgaagacagctacagtgtacttacatataacaaataaataataaatcttttttgtttgtttgttttttgttatttgagacagggtatctctgtgtagccctggctgtcctagaactcactttgtagaccaggctggcctcgaactcagaaatccacctgcctctgcctcccgagtgtgggattaaaggcgtgtgccacaagcccggctatagtaaatcttaaaaagaaaaaaagaaaaatgggccggggggggacgacgacgacatagatttcatatccttggtagcagtgccagaagaaaggaaggagagaaggaaaggagaagaaggaggaggaagggagaaacaaaacctggtgagatgactctatgggtgtaaaagcttgctgcgaagcctgacagcctgagttcattccaagagaaccatatagcagaagtagagaacttttacaggttgtcctctggctgcaagcataccccgtggcacatccacacacatacatgtgcatatgtggaagtcagaggatagcttggtggagtcagttgtcaggtttggccacaagaaccttaactcattgagtggttgggctggtcccttatacaaaaatctcaacaacaacaacaataacaaccacaacaacaaagacactggagaggtagcacagtggttaagagttctggctggggctggagagatggctcagcagttaagagcactgactgctcttccagaggttccgagttcaaatcccagcaaccacatggtggctcacaaccatctgtaatgggatctgatgccctcttctggtgtgtctgaagacagtaaatctttaagagagagagagagagagagagaattctggttgctctttcagaggacctaggttcaattcccaagcactcacatggcaacttacaactgtctgtaactccagtactccagttcctggagatgtgacactctcaggcagacatacatgcaggcaaaacacaaatgcatatagaaaaaatatttttaagctcaagagaagaagaagagagagaagcatggggggtgtacagtggagtgacctgcctggagggactttgaaatgcttggag

SEQ ID NO: 3440 - DNA, 432 bp, Mus musculus
atgacgttcacttcgttaacactgcccaatatgttcggcgaccttcggtccacatttattgccttgatgattggatcctacgcttcctcagcagttaccttcccaggaatcaagctcatctacgacgctggcccagccctacagcaggctcaaaataggagtcagccttgctttatgatggggacctgtgtgtatcggtgtgatcacagtgccccctgctggcagactcacatcaggggactggaacggttcatgtagtagaagcctagccggcctgcctggctcactaacccaccttgccttgacaacccctagaaaccctgcctgagacctcttggggtgccaagaggggtacattggtttttaagtttatggttttctcttgttttatcatgattctttttatgaagcaataaatccatttccctgttg

SEQ ID NO: 3441 - protein, 85 aa, Mus musculus
MTFTSLTLPNMFGDLRSTFIALMIGSYASSAVTFPGIKLIYDAGPALQQAQNRSQPCFMMGTCVYRCDHSAPCWQTHIRGLERFM

SEQ ID NO: 3442 - DNA, 1835 bp, Mus musculus
gggcgggcccgatacacactggtaggagccgggtgagctggactcccaggatccgggtctcagacgagggtgtctgcagaaccggagcccgaccaccgccacaccgcaccatggcgcccaccctggccactgcccatcggcgccgctggtggatggcctgcaccgctgtgttggaaaacctccttttctccgcagtcctcctgggctggggttcgctgctcatcatgctcaagtccgagggcttttactcctacctgtgtacgaagccagagaatgtcactaacagcacggtcgggggcagcgcagagccggaacccgaggagttgagcctggtgaatggctggctcagctgtaaggcccaggatgagattctgaatttggccttcaccgtgggctccttcctgctcagtgccatcaccctgcctctgggcatcatcatggacaagtatggtccaaggaagctcaggctgctgggcagtgcttgctttgctgtctcctgcttgctgattgcatatggagcaagtaacccagactcgctctctgtgctcatctttatcgccttggctctgaacggctttggggggatgtgcatgacgttcacttcgttaacactgcccaatatgttcggcgaccttcggtccacatttattgccttgatgattggatcctacgcttcctcagcagttaccttcccaggaatcaagctcatctacgacgctggcgcctccttcattggcatcctagtggtctgggctggctgctctggcctggtttttttcaactgtttcttcaactggccactcgagcccttcccaggcccagaggacatggactactcggtgaagatcaagttcagctggctaggctttgaccacaagatcacagggaagcagttctacaagcaggtgaccacagtggggcgccgtctgagcgtgggcagctctatgcggactgccaaggagcaagccgccctgcaggagggccacaagctgtgtctgtccactgtggacctggaggtgaagtgccagcctgatgctgcagcggccccatcgtttatgcacagtgtgttcagccccctcctggtgctcagcctggtcaccatgtgtgtcacacagctgcgacttatcttctacatgggggctatgaacagcatccttgagttcctggtcaggggggaccagaagacagttgccctctatacctccatctttggcgcactccagctgctctgcctgctgacagctcctgtcatcggctacatcatggactggaagctgaaagagtgtgaagatacttcagaggagcctgaggagaaagaaggcactcaaggtgaaaagaagcagaaacgagacaggcagattcagaaagtcacgaatgccatgcgggccttcgcctttacaaacgtgctgcttgtgggttttggggtgacctgcctcattcccaacctgcctctacagatcttctccttcgtcctgcacacaattgtgcgaggattcatccactctgccgtagggggcctatacgctgccgtgtacccctccacacagtttggtagcctcactggactgcagtccctggtcagtgcgctctttgctctcctgcagcagccgctgtatctggccatgatgggtcctctgggaggagaccctctgtgggtgaacgtgggtctgctcgccatgagcatgctgggcttctgcctgcccctttacctcatctgctaccggcgccagctggagaggcagctgcagcagaagagggaagacagcaagctgttccttaagatcaatggctcatccaaccgggaggcttttgtgtagtgcccacccaccgcctca

SEQ ID NO: 3443 - protein, 558 aa, Mus musculus
MAPTLATAHRRRWWMACTAVLENLLFSAVLLGWGSLLIMLKSEGFYSYLCTKPENVTNSTVGGSAEPEPEELSLVNGWLSCKAQDEILNLAFTVGSFLLSAITLPLGIIMDKYGPRKLRLLGSACFAVSCLLIAYGNPDSLSVLIFIALNGFGGMCMTFTSLTLPNMFGDLRSTFIALMIGSYASSAVTFPGIKLIYDAGASFIGILVVWAGCSGLVFFNCFFNWPLEPFPGPEDMDYSVKIKFSWLGFDHKITGKQFYKQVTTVGRRLSVGSSMRTAKEQAALQEGHKLCLSTVDLEVKCQPDAAAAPSFMHSVFSPLLVLSLVTMCVTQLRLIFYMGAMNSIFLVRGDQKTVYTSIFGALQLLCLLTAPVIGYIMDWKLKECEDTSEEPEEKEGTQGEKKQKRDRQIQKVTNAMRAFAFTNVLLVGFGVTCLIPNLPLQIFSFVLHTIVRGFIHSAVGGAAVYPSTQFGSLTGLQSLVSALFALLQQPLYLAMMGPLGGDPLWVNVGLLAMSMLGFCLPLYLICYRRQLERQLQQKREDSKLFLKINGSSNREAFV

SEQ ID NO: 3444 - DNA, 75858 bp, Homo sapiens
  misc_feature (1)...(75858): n = A, C, G, or T/U
cttgcctcaccccaggtgtgaagacccctgccccactggtacctttggggaagactgtggctctacctgccccacctgtgttcaggggtcctgtgatactgtgacaggggactgtgtctgcagtgccggctactgggggcccaggtaaggatggggatcccgggggcgggagagtgccaggggcctaggtcagggctctgtgcagcatttcctgaacttccctggacagtgcccagaaatctccctgcccgtctcctgcctgcctcccccacttcacccagccctcagcctgcctctccatgtcactccatagctgcaacgcctcctgcccagccggtttccatggaaacaactgctcagttccttgtgaatgcccagagggactctgccaccctgtctctgggtcctgccagccaggtaaggtggaagaaggctgcggggtgcagtagccagggaaaggcgggcccttcacatgggctccagggcaagttcctcaccagggagtctgggcccacttcagagatattcttttttttttttttttttcccttaagacgaggtcttgctctgtcacccaggccagagtgcagtggtgtgatgtcagctcactgcaacctccacctcccaggttcaagccattctcccatctcagcctctcgagtagctgggattacaggcgcacgcctccatgcctggctaatttttatattttagtagagacagggtttcaccatgttggccaggctggtctcaagctcctgacctcaggtgatctgcccacctcggcctcccaaagtgctgggattacagacgtgagccactgtgcccggcccagagacattctttatacctgagctctgtgtggatgctctggggccccctgaagatgtgacagagcccccgcccctgcgaaaccaggctagagccgtgaaatgggcagcggggtggctggacactgacatggcctcaggggcaagaacctgtggaggggacacgccagcagaggggctgcccggaggcagggagtgacccccaggaagaagcttctgggtagcaggcaactcagagcaaagacaggatgtgtaggagacaggaaggcctgaatatcccccgtttctggctcccccaggctctggcagtcgggacactgccctcatcgtgggcagccttgtgcctctgctgctgctcttcctgggtcttgcctgctgtgcctgctgctgctgggccccccgatcagacctcaaggacaggtgaacgccagcccgtcccttccccacacagctcaggccacagggtgggagcaggggggcatctggtttccttgtggggtggggagggctggccttgttgcccacgtgggtcagaggtgatgggggtggggagggctggccttgtcgcccccgtgggtcagaggtgatgggggtggggagggctggccttgtcgcccacgtaggtcagaggtgatggaggtagttggcagtgcccgtggcctggagacactggagacaccgggtcagctgcctgccctcctcggaagccttcaatgaggaagtttctgagttgcatgggcaccaggctggcgaaccggagcctgcagcgggaggcagaaagctgacaccggcggggaccagaggaggagggctgggaccacggaaggagcagcccggctctgggccaggagggaaagagaccaggcctcagatggcccacgaaggaaagagacatcaatgtctgtgcagtggtttagcagagagtgtagctgcctgagagacggagaggggaggaagggttgggctggtggggcccgcgcagggggcttacgcagagctttgttcctttatgaaacctcgtcacattccaggctcctttgagactcacagcagcgtggaggtttggaacagggagtgtggggccgggaggataaatgtcctcaattcccagaggacattgaggcccaaggtgatctagttggtactggcacacaggaagcccctctccacctttttggactctttgtctggtgctctcttactagttcctgccctagtccaatagcacatcctcctctgtgcttgtgcggcattcacagaggagcagatacagttgcccctggcccagggcatagagcccagggtgggaagaagcccctcgcagggacacgaggacaggtgcaaaggctgttggaggaacagtgaagagcagagcagtctcctccacatgtgggggtagagcagagtgggaacaagggaaggcttcctggagggggtgtcatttgagacaggtgggccgggcgcagtgactcacgcctgtaatcccagcactttgggaggccgaggtgagtggatcacctgaggtcaggagttcaagaccagcctggccaacatggtgaaaccccgtctctactaaaaatacaaaattagccgggtgtggtggtgcacgcctgtaatcccagctactcaggaggctgaggcaggagaatcacttgaatccaggaggcgaaggttgcggtgagccaagatcgtaccactgcactccagcctgggcaacaaaagcgagactctgtcccaaaaatagagagagagagagagagagaaacgtgagctgaggctcagctaggatgataataacaaagacctgccaggtcctgcaaaaagctcagatagatgatagatagatggatagatagatagatagatagatagatagatagatagatagatagataggatctgttttacagatgcggaaactgaggcctagggaggtgaagtgtgaaccagagttgttactcagctgtctgactctagagccactctttgttctgtggcaggcctgaattgtgggctcaatcatttggattttattctgtagtcaatagagagccactgaagccactgaagtagaggcagtcaccctgtcacaccctgccaaggtgacccaggtcaccgtgggtctcatgtactgaccagtgtccctaccctcctccctcaggccagcgagagatggagctaccgtgtccaggatgaagctgcaggtctgggggacactgaccagcttgggctccacgctgccctgccgttccctcagctcccacaagctaccctgggtgacaggtcagtgggcgctgggggccggggtctgggattggacagggctttgcatcaggtcctgcaggcgcctgatctggagtctctacagtctcacatcacgacccggaggtccccttcaaccacagcttcatcgagccgccctctgccggctgggccactgatgactccttctcatccgatcctgagtctggagaggcagatgaggttcctgcctactgtgtgccaccccaagaaggtagccccccaacagcccacatagcccctgagcagccctgcccaccacgaccccctctttagtcctccagcaaagttatttatttttatttttttttgagactgggtcttgctctgtcgccaggctggagtgcagtggtgcgatctcagctcactgcaacctctgcctcccgggttcaagtgattcccctgcctcagcctcccaaatagctgggattacaggcgtgcaccaccacacacggctaatttttatattttagtagagaccgggtttcaccgtgttagccaggatcgtgatccacccgcctcagcctcccagagtgctgggattacaggcatgagccactgcgcccggccagcaaacagttattaagggcccattttgtgttagtcactgttcttggctccgggcatgcaagagataacaagacagattcctatcctcaccaggcttagagtcagacgggcagtcatcagacaatgacaggacacagtgatatgtgtttccatgggggacatacaagtagggactcatttgctagccatgttggggtgactggggtcagggacgatgtgtgtggcatcccagtcgagtctagcagaatcagtaggagttggccaagtgaaagtcagggagaggagggaatggtgtttcaggaagatggaacagcatacacaaaggcccagaggtgagagggatgtggctgtgtgccattgaaagagttttagcttggtaagagtgtgacagtatttcaaagtagggagaggtggtgagaaaagagtatagagaccaggtgtggtgactcacacctgtgatcccagcactttgggaggctgaggcgggaggactgcttgaggccaggggtttgataccagcctggccaacatagtgagaccccatctctacaattaaaaaaaaaaaaaaaagagtgtagaagtaacagtgtctacctgaattggtccttctgccactctcctcatccttgccctcttccttgccctatttttgaggcctcctggaagatgctgagctgtgggtaggatgcattggggtggccagttcagctccagccaagctcttctgtctcctctgccagggatggtccctgtggcccaggcagggtcgtcagaggccagcctggctgcaggtgctttcccgccccctgaggacgcctccacgccattcgccatcccgcgcacctccagcctagctcgggccaagcggccatcggtctccttcgcggaaggtaccaagtttgcaccacagagtcgccgaagctcaggggagctctccagcccgctccgaaagcccaagaggctctcccggggggcgcagtcgggtcctgagggccgggaagccgaagagtccacaggcccagacgaagcagaagcccccgagtcctttccggcggctgccagtcccggggattcagccactggccaccggcggcccccacttggtagccggacagtggctgagcacgtggaagccattgagggcagcgtccaggagagctcgggccctgtgaccacgatctacatgctggcagggaagccccgcggatccgaaggccctgtccgctctgtcttccgccattttggtagcttccagaaaggccaggcggaagccaaggtcaagagggccatccctaagcctccgcgccaggccctgaatcggaaaaagggcagccctggccttgcctctggctctgtcggccagagccccaactcagccccaaaagctgggcttcctggggccacagggcctatggcagtcagaccagaggaagcggtccgggggctgggggctggcaccgagagttcaaggagagcccaggagccagtctctggctgtggctccccagaacaggatccccagaagcaggctgaagaggaaaggcaggaggaacctgagtatgagaatgttgtacccatctccaggccaccagaaccctgatgaccttgaatttggggagtggggagagtggatggactagactgtgctgtgtgctggaaaatgatcccggggccaggacagacaaaccagagcctctgcgcctccacagggaaaaggcaaggcttccaggccagttggcccaggcccctggcagtgctcccggaggggcccaggaaggcctgggcagagaccctgtaggatggggtcaggaagggttgcctgcagggacttttgctctgctgtcctggaccctgtgtgcctcataagggctattctttctttcacgtgcaaaacatttttctgaaatagcaaacaacctacatgtttgctgataaaagattggctaaacaaatttttttttttttttttgagacagaatctccctctgtcccccaggctggagtgcagtggtgcgatctcggctcactgcaagctctgcctcccgggttcacgcccttctcctgcctcagcctcccgagtagctgggactacaggtgccctccaccacgcttggctaatttttttgtatatttaatagagacagggtttcaccatgttagccaggatggtctcgatctcctgacctcgtgatccacctgcctcggcctcccaaagtgctgggatgacaggcatgagccaccacgcctggtctatgaactttttaaaaaggatgtatgtgtataaaaacagattcaagggaaaggcactaaatggttttttcctctggaagatgagattgtaggtgatatttattttcttctgaaacttttgtatagtttgcaaattttctacagtgaacattcttttttacttttgttactagattgaatttgataaagtataataaaaagcaatgatctttgttaaaaaaataaaaagtactaacattacagacatgtataaagtaaaacggagatttcctttctccccagaggcgtctgtgggtcaagagagaggtagaatctacttttccctggcagctttttggtcttgtttgaattctttgctcacatattacctagtcagaaaagaaaaggggcaaccctccccccgagctttatttttttttttttaagatggagtctcagtctgtcacccaggccggagtgcagtggtatgatctcggctcactgccacctctgtctccccggttcaagcgattctcctgcctcagcctcctgagtggctgggattacaagcgcccgccaccatgcccggctaatttttgtattttttggtggagacagggtttcaccatgttggccaggctggtcttgaactcccaaactcaagggctccacagcttcggcctcccagagtgttgggattataggcatgagccaccgcgcccggccaggggcagccccttctatctcagtgctcagagagtctcatcaacagttgaggtgctttctttcagatgtttttctgtgtacatgtcaacaaatattttaaacaaaaaattttagcatactaagcatactgttcctcagcttctttttttttttttttttttctttttgagacgaagttttgctctgttgcccaggctggagtgcagtggtgcaatctcagctcactgcaacctctgcctcccgggttcaagcgattctcctgcctcagcctcctgagtagctgcaattacaggtgtgtgccaccacacccagctaatttttgtattagtagagatggggtttcaccatgttggccaggctgttctcgaactcctgacccgcctcggtctcccgaagtgctgggattacaagcgtgagccaccgcggccagcctcaacttgcttttttacttaacgacatatcctggatatagttcaatgtccataaatgtaaagctaactctctttatttaaaaaatgactacatgagattccatctagcacaattatttaaatcattcccccgccaatggaaggttgggttgttctgatctgttttgatacaataagcaatgacatagtatacaactttgtccatatttatttatttatttattttttgagatggagtttcactcttgttgcccaggctggagtgcaatggcacgatctcagctcactgcaacctcggcctcctaggttcaagcgattctcctgcctcagcctctcgagtagccgggactacaggcgcatgccaccacgtgcagctaatttttttgcatttttagtagagatggagttttgccatgttggccaggttgctctcgaactcctgacctcagaagatcttcccaccttggcctcctaaagtgccgagattacaggtgtgagccactgtgcccagccactaaagcttctaaaaagtatatataatttttgtgtgtgtgtttagccatcaacaattatatctcattacaatttaaagttctatgagtattctaaggttgtttcttttccgtcttggctcactgcaacctccgcctcccaggttcaagccattcttgtgcctcagcctcctgagtagctggaattacaggcgcccaccaccatgcccagctaatttttgtactttttgtagagatggggttttgccatgttggccaggctggtctcgaactcctgacctcaggtgatccacccacctcagcctcccaaagtgctgggattccaggtgtgagccaccgcacctggccatttgccccttttcaggagttcatgttttcattccacaaactcatattgtgcaactgctttgtgcttgcttctctatcaagggctggtcatacaaagttgaataagacaccgtcctgcccccaaagagttcatagtcaattagagaggaaggcaaacagacgaatagctaattataaaacaatgccagcagtggacaaataaagtgaacagtattaatggggagtggttagggaaggcttcccagcggaggtgctgtccaaaatgaggctatgtcgcgagctagaggagagagaacagcaggtgcagaaaccacaggcaattccatgtgactggagcatcggggaccaggcaggtcagatgtccttcagagggagggagagggaggagcctgtgtgggtcaaattggggaactggaacttttaaattttgtttatttttttgagacggagtctcgctttgttgcccaggctggagtacagtggcacaatctctgctcaccgcaacctctgcctccccagctcaagcaattctcctgcctcagcctcccaggtagctgggattacaggcgtgtgccacatcacccagatcttttttttttttttttcttttcagacaaagtttcgctcttgttgcccaggctggagtgcagtggcacgatctcggctcacttcaacttccgcctcccaggttcaagtgattctcctgcctcagcctccagagtagccgggattacaggtgtgcgccaccacacccagctaattttttgtttctttagtagagacagggtttcaccatcttggccagactggtatcgtactcctgatcttgtgatctgcccacctcggcctcccaaagtgctgggattacaggcgtgagccaccgcgcccagccatttttgtatttttagtagagacagggtttcaccatgttggccaggctggtctttaactcctgacctcaagtgatctgcccgcctcagcctcccgaagtgctggtattacaggtgtgagccaccgtgcccagccaggaactggaactttatcctgttttacaaataatagtttctgaaggattttggcagaagtcacatttacatttcccttagtgccctgggatgagatgggggctggatttgaggaactgaaatctgaaggtggctcaacaacagtagttgcgggcctaagggcacagatggaccgattaggtaaatatgtaggagatacagctgtatcagtttgatggggatgcggtgagggagaggcagaatcacagcgactgcctaacaaatgtctgatgaaaggatggttctcagcagggcactgtgagtcatgcctgtaatccctgcactttgggaggctgaggtgggaggatcacttgagcccaagacttcaagaccagcctgggcaacagggcaagaccctatctgtacaaaaaatacaaaaattagccaagtgtggtagcatgcacctgtggtcccagctacttgggaggctgaggcaggaggatcacctaagcccaggaggtcgaggctgcagtgagctatgatcatgccaccacactccagcagtctgggtgcctgagatcctgtctcaaaaaaaaaaaaaaaagaaaaagaaaaagaaaaaagacagggttcttggtatctaacttcagtagacagtagtagtatggttatctgagagaaaatgtggaggacagttctgggggatatttgaggcatgtttgagccctgcagcgccgtcaggctgctcaaagaggagggaagggtgaagaaagagatttttcagatggcagttgaaaccttgggagtgggaagggttccacagggtgaggaaccgggtaggctaccagctggagccgccccccagcaggctgacagctccaagcgttgtctgggggaggttgccctcgccaggtggcccgggcggattctagacagtagggggcacactcggactggggcaggtggagcaagaggcgtttggggctcccacagccctggggtggtggtggggttttatttttggtttttattttggtagagatggttctcgccatgctgcccaggctggtctcaaactcctgtccccaagtggccctccgaccttagcctcccaaaccgctgggattccagacgtggacaccgcgcggcagccctggggtgctaagccagccccccggagcgagccagggtgaccaaggcgattctggggcagtcagagggtcttcccgggtcgggttagtgcctcgaatccgggggacgaagacggggagctgagctttcggagcccgggcttatcagacggggacccggagccccctcgaaccctccctagcttgtaccagctggcggacgtggcccgtagcatcgccctgcagaggggaccttccctgaaagggacggggaacggggtgaaggtggccagcgcgggcagggagcacccagatgacgatcaagggtggagggtccccggaggaccgagcagtgcgtgaacacgggcggagaaaggtcagtctgatggggggagctcaggagaccccatcctaggacgggacagaccagccccaaatccccttgcagatttccaagggccaacttccagggaccgggcagacgccaccggggagaggggaaggggtcggtgcatcagcggggggcgccacggctggaccgggtccgggatcccaggccccgaatacgccgggacgggaaccaccggggcgggggagcgaggaaccaggacccaaagcccgaggcggcggggacggcggcgctgcgtggggaggaggcggggtggggattcgagagtggaaccaccgtgcggagccggcgcatctgggcgtggtgacccgcgcgcagggggcagctggggacggcggggcggccgcgggagagcccggctgggggcgctggtggcccggcggcttctggggggagtccgctgggggccgggacgcggagccggagccccagcctcgcagggtcaggccgctggagaggccgcggggcgatgtcgccggggattcccggccgcgctgtgactcgggttgaaggctgcaaagccgaggcccggcccgcagcgcccaggcccctcccgtcccccatctctcttgtttgtctccgagtccggccggaaccggcttctgctcgcggcggggcgggcggggggctggctgctgattggtcgacgcctgtttccagccccgctcagccaatcagcgggcggcagtgttttcttcttggggtcggaataaaagggctggaataaaagagggcagaaaaggcgccgggcgggcccgacacacgccggaggagccgggtgagctgcagcagggaggggatcgcggccggggcgagggcgcgggggcagaagcggccgccgaaggggcgtagggagaaaacgtgggaacaagaggagagagatggagcgatgaggggccgccagggaagagatgacgaacagatgcgggctggggaatggaggcgcgggggtccgaggccatggaaacgggcgagttgccgggggaacgcccgagatgggggtcgcgcggctggctcgcgccgccggtttgaaccggctcctcgtctcccacgctgggttcgcgtggccgcagcgcctagcgacctagacggcggccaatggcgcggcagttcctgcgccgtccggccaatgagcgcgccggggcgggccgttccgtaggtctgggcgctgatcttgtggttgaagaaaccagctctggggaagggtctcgggcgcgggcgggagggcacctgtcagggtccctgggagaggcagccctcggatctgcccctgcccacctcacgctgcgttccatgctggccccaggcgatgtcagtcctgctgcaggccaggactagttccacggccctgagcatgcgttagccccttcttgcctccatgcctcagtttacctcggagtgagctgcgggagacgtctccctgcctggccggggcggctctgtcgtagcggagggcagcggtacgagccggccgcgggctcggggtgtcccaggtccgggcagggctggggttcgcttcctctgctgcgcgcaccggccgccgcggccggggaggggtggcaatcccgagccctgcggcagcggtcggggctgctgggggcggccgcaggggctgggcaagggccggccgctgacgccgagttctgtgcgcaggtggtgcagagccggagccggagccggagccgcgccgcgccgcaccatggcgcccaccctggccactgcccatcggcgccgctggtggatggcctgcacggccgtgctggagaacctcctcttctcggcagtcctcctgggctggggctcgctgctcatcatgctcaagtcagagggcttttactcctacctgtgtaccgagccaggtgagacaagcgcctggggttgcgggggggctcctggagctggggctttgggagggggcgggatgggggcgaagacctagcgagccacagcaccgcattgcccagtgcctctagggtatcagaaggcccatctgatcctcacccagccctgccgggtacttgtcattgcccctgttttgtggacgaagacatcgaggctcagagcgatctgtcttgcgcaaggccgcagagcctgggcctgccatccacccagaaccccacctgctgtccagggtgttccttccacccgctacgaacattgctggactgctctcctctcctcccagccctggaacatagcttggctggtagtaaacatgttgctgtctgcttgtgagaaagaggaactccagattaaggggctggggtgcagcaggagaggaagtggccttgcctccaccccagggagggctcatctagaatctagacgttcctcaggccattgtggagtctcctaagtgcttgctggacacaatttcttgtctatttttgctgccttatgattctccaaaggacatttcccccacgggctctgaggacatctccgtggctttccaaccccatggggatgaaggggaagagaagaaaggaacgtttatggaaatgatgctagggttgttctctcctctttgccttgtcactggaattgctgaaggcaggctgaggatgcttctctacatgacatctgcaccacccaacacacacttaccttcacaccttcataccctgttggagggtcctgatgactacagggcagtaaattcagccccacaggagggccacagcagcccccagcctctagcctcctaccctccttcttaggcaaccttgacaggaaattttccctctgccttctccttgatcccaacggtagctgcataatagctgagctcacataatccctgtcgccagtgctagagtgcccttagatggaggtagcccaggtttgacttcctgaatccccagcagcaggccttttctttctagagctctttgcaggaagagaaagctttggaccagctcatgctgggtgtaatcctttgtggaagcctccctgtttcccttctctgatctgccccggagattcctgtgtgtcccagtctctagggagggaggcttagctggagaggttcagggcaggagaaagcaggagaatgcagaggccgcggggagaggacagaaagtatatcatttataactaacctttagcctttagccactcaaaaatatttcctaatagcctaagggttcttggcaggtctttccccacatcagcaagaaatcttgggagttgggaagagtcagaccttgttccctgaacaagctttctgctttggccaagagttgttaggagattaatgcctgtccccgaaaggcacaggttggagtgtttacttcttcctctcctttcctctctccccccttagagatcgtgacccttcctgcttgcctccctggtgggctctttcaggctggacacagggtttaaaaaaaaaaaaaaaaaagcagaaaaaaagtcatcgtccccagagaaagcttttagtgtctcacccagaccagagaactgttgtgggcaggtgtttttttgtgtgttttttttttaacccaccatgatgtcggaaggtcagattctaggtgttttttgtttgttttttgttttttgttttttttttaatagaatgtccacggatttaattgattgtatggttttggcagaattgggtctggtcctttcattcctgcctcaacctcagcttcctcctctgtctaagtgggaggagtcccagagattgtgccagcgcagtgctgagttggtgttttaagccctgggcagacttgacaggtaactccactaaaccaaagtgaaggtgaagggtcaggattgtgggttgaacatcaacttcttatcccgaacttttgctcctgcctccaattttggtttttcttattatctggcaaacatgctgagcccacgttctgggcgggaaggctgctgattccacacagcttatctctctggtcacactgctccttgattcttggagtctgcatcaccagttttctttcaggccagaaatccccgcatttggctcgtctgggagtgcctggcgaagttagggtgaaggtttctgcttcagtctaacattttcaaacttggtgcatggctgaattgcagagaagcagataggccatttttgaatttattgaattagacttgtgaaagcctgagcagtgtccggctgattgagatgcaaatttgtcagcttcgtgtcactctaggacgatgctttagtttgttctctaaagaaaatttgcctgaacctgttgaaaggttcttagaactctttcttacgactccagccagaatctcgccacagacaccgtgttgggttccagcctggtgaggtggcagaaggaaggaaacagctcatttctcggctgccccgcagtttgttcttccttgcctgctgggagacgtggcaggctgggtttggggacctgggtgcgggaagttggcaatgggttttgcacaacgtcctccaggtgttggctgctggatgcctccctcgtccccctggtgagggcaggagaccagttgggttctcagcccgagaagcacggggcttcctggagctgtgtcctcttggcctctgggatggcaacgtgacggcccactcctgagctctttcttcattttctctgttgtccagtggcccccgcttcaacagggtcagggtcagcctggggggctgcggctacctgtggatggtttttttttatttgagacagggtctcgctctgttgcccagtctggaatgtagtgttgcaatcacagctcactgcggccttgactcctgggctcaagcaatcctcccgcctcagcctcccgagtagcagtagctgggactacaagtgtgcgccaccatactcagctaatttttgtattttttgtagagacagggtctcgccatgttgcctaggctggtctcaaactcctgggctcaagcgatcctcctgcctcagccttccaaagtgctgggcctgcaagcatgagccatcaaacccagttagttttttgtttttgtttttgggattacaggtgcccaccaccacgcccggctaatttttgtattttttagtagagatgtggttttaccatgttggcctggctggtctcgaactcctgacctcaggtgatccacccgccttggcctcccaaagcactgggattacaggtgtgagccaccacgcccggtcaaattttttgtagagatgagggtttcatcacgttgctcaggctggtctcaaaactcctgggctcaagtgatccaccagcctcagcctcccaaagtgctgggactacaggtgtaagccaccatacccagttaatttttaaatgttttgtagagataggggtttcaccatgttgcccaggctggtcttgaactcctgggctcagtcgatccacccacctcgggctcccacattgctgggattataggcgtgagccaccgctccaggcctacatgtggatcgttaatcccctctttcttgtaacctaaacattcagtaaacattgacgaaggtgccgtgctgggtgcagaggaaacaagtcatcacacgcatacctgtgtaacccgtataattccagggggtggtcgggcccccaagaaagcagggcgccaggagctagaacagcagcggagatgtggctcctgctgggtgggagggcctctctgcggttcaggtggaagcctggaggttgaggaggggtgattcaggagaggagggtacaccctggaggagaggagggtacaccctggaggagaggagggtacagcctggaggagaggagggtacaccctggaggaggggagggtacagcctggaggagaggagggtacagcctggaggagaggagggtacaccctggaggagaggagggtacagcctggaggagaggagggtacagcctggaggagaggaggatacgccctggaggagaggagggtacgccctggaggagaggagggtacagcctggaggagaggagggtacaccctggaggagaggagagaagtgggaaggggcgggggctgcagggactgggaggccattcggggaaactgaattttattcccaagacaggaggaagccagggagatagaggagggcgaccatccaattcccctgttagaggcttgtgtgaattgctgagggcttgccacatgctggtatgtttgggtggcatagaaaccagaagtcatcacggcctctgcctgaggaagtcacccacagtctgaccatgggcatgaaggccgaccccagttgtatgctcttgacctctgcagtttctccgcctgtggtggtgggagagagcctctcaccctggcacagaggtccctgcgagctcgccctggcacagagatcgctgcaagggcagaggggctgccgcccaccttggggaagcaggcccaggcttgatccccacgggctgagtgaagctgcagatgtggacaggagatttctctgctgcctcgaggacctcttttcttgggggatggggaggagggaacggagtttcactcttgtcgcccaggctggagtgcagtggcgcagtctcggctcactgtaacctctgcctctcgggttaaagcgattttcctgcctcagcctcccaagtagctgggattacaggcgcctgccaccatacccggctaattttttgtatttgtatttgtattttattttattttatttttttgagatggagtttcactctgtcgcccaggctggagtacaatggcatgatctcagctcaccgcaaactccatctcccgggttaaagtgattctcctgcctcagcctcccaaatagctgggattacaggtgcccaccaccacacccggctaatttttgtatttttagtagagacagggtttcaccatgttggccaggctggtctcaaactcctgacctcaggtgatctaccagccttggcctcccaaagtgctgggattacaggcgtgagccactgcgcccagctcaagggcctctctttttagagtctctcctcacacccacaggcaagtgtggatagtttttttttttttgagacagagtcttgctctgtcgcccaggctggagtgcagtggcgcgatctcggctcaccgcaacctccgcctcccgggttcacgccattctcctgcctcagcctccccagtagctgggactgcaggcgcccgccaccacgcctggctaaatttttttgtatttttagtagagacggggtttcaccgtgttagccacgatggtcttgatctcctgacctcgtgatccacccgcctcggcctcccacaatgctgggattacaggcgtgagccaccgcgcccagccggatagctttcttaaatccagcctttcacttttattgctataaatatgacttttaaacttttcccccagtttatttggaattttaaaaattccatagcaatgggtaagaaggtttaaaggctggggccggcagcctcaggatgcgtctcagagaagagctggtggccttggctcttcccaccgccccagcctccctccttcttggttcgtgacctcatttccctcacagacatccactggccacccctggcttctggtgtccatgaaggtcctgtccagcttaggctggctctcagggacctcgtgggagagtcttagtcccattcccaccaagcgatattcagggcctcctggtgttgccggcacatgggcagccttttcccggctctgttctctcagcattttctctctgggatatgagcctctagcccaggtaggccagcatcggcacagaccgagtggtaagagcgggagctttggggtctgacagcctggagtcaagcccagcttccccagggacccccatgagaccttctgcaagtgacttacctgctctgagcatccctcggggacactctgacagtatcctcgtggggaatatggggtgggcgtgggcacacccgttgagcatggcagctggcacacactttcattgcacacacggcagccgctgctgggaccactgctcgggggccaggccctggtcagcccaggacggcctctgcctgtccgtgccctcctgcctgttgtttgctctgtgtctgagccgacctctcacctacatctcccctgccggactgaggactgagatgctgcttcctgttgccggatagactaaggatttgagagacgggagatcctgggcaggggccatcggtgggctgtccaggggcccgcaccctggagggggggctcggaaagcgactagtcagggaagggggcagctcaggaatttagaggggacctcaagccaggtacttcttggccccctcaagcatcatcttggaggcccccctccctttgtctccccggggtgtggggaggctcctctttgcctcaggggagcctggggggccacagcaccctcttttctccctgattcctctgtaaagatcttgtgcgtcttctgtgagtggggctgaacggtgtacgtcctccctggccctgggtctcctcctaagcagccctgttcctgttcttggcactcactggccacaccaactcttgcctgtcttctcagttcaccttctctggccaggctgggctgggccacttctggccaccccagaggaggcatctgtttaataaacaggtgcaggtgaggagcagagcagcctggccgggggtgagcagagcaggctggcccggggtcaagctccaggctgggagcagagggccaccccacgccttggcacttcctgggtgcttaatctgtttgtctctctcctgacccacggtggcccaggtgggagcagagggagaggaacagcctgggtgtgtctgtttgggcatctgctgggtgcatgtgggctgtttactgtcaacagagcttctgggctcaccaagggcttccttccctccagcaggagggagactctcaaattgctccacaagcagaaggagaagccgctcacctccccggccccaggcgcctctgttgctggacgggacggcctggaggcaggcggccgggcagagggcctggtggccccatcggcagggatttgtttaagacgagaaggctgttggcctacgtgcaaggtccctgcccctgtgtgtagtcgctccagggtaaaagatgggaaggacagatacccttgcctctaccctgaccttgcctcttccctatgtggttaaaggggtgaccagatctctaatcaatttaagacttttgtttgtttgtttgtgtgtttggagacagagtctcactctgtggcccaggctggagtgcagtggcacaatctcggctcactgcaacctctgcctcctgggttcaagcgattctcctgcctcagcctccaaagtagttggggttacgggtacctgccaccaagcctggctaaatttttttgtatttgtagtagagatggggtttcaccatgttggccaggctggtctcaaactcctgacctcaagtggtccgcctgcctcggcctcccaaagtgctgggattacaggcgtgagccaccgtgcctggcctagccttgggatttttatcttctggctctagatgagaaaacccatgggtttagagacccagctgtggttcctccctggggtaactggaggtccctggtgcctttactcaggcagtgctgcctcacccactccattccttgtccccgtggctcctgcttgcagcagtagaacctgcagccccccaagccctcagttattccacggcccctgtgcagtcactggccccacaagtcacccatcctgggccctggcgtgctctctccatccatcctctctgtcacctctgtgctggtttgctcctatctgcatgtcaacctggaaatggctgttgctttgtagagaccctctttccctgacttcagagccaattcctttgctgctggcagagctgacatttgaaaccaacaccaactcacaaagcagctcctcctttccagaagctgccccactgtggatgggcgagtggcccaggcctgtcggctgtggcggtgtacatgaccgctctgagctccaccctgacgggctcgaggaccccgtctgccatgtgtttggctgaccgtgtggtagagcttctttttggaaaaccgagagaaagtggccgaggtgggaatctggttggtgacgttgtatttctgtggctccacatggttaacctcgtggctctgatctccttaaatcccccctcgattcaacgtggttctgttgattcctctctcgatctttttggccattgtgatctggtgccattgtttttgttttgttttgttctgttttgtttttcgagacggggtctcactctgttgcccaggctggagtgcagtggtgtgatctcagcttaccacaacctccgcctcccggcttcaagcaattctcctgtctcagcctcccgagtagctgtgattatagacgcccaccatgcccggctaatttttgtatttttagtagagatggggtttcaccatattggccaggctggtcttgaactcctggccttaggtgatccacccaccttggcctcccgaagggctgggattacagactgagccactgtacccggcctgattctgtttgtttgtttgtttgttttttgttttttttgagacagagtctaactatttgcccaggctggagtgcagtggtgtgtgatcttggctcactgcagcctccgtttaccgggttcaatgattctcttgcctcagcctcctgagtagctgggattacaggcatgcgccaccatgcctggctaatttttgaatttttagtagagacggggcttcaccatgttggccaggctggtcttgaactcctgacctcgggcgatccacccgcctctgcctcccaaagtgctgggattacaggcatgagccgccacacctggccctgttgtttttatttattcagtaaacagctattgtaggccaagacctgggtgagatactggggacacagaagtgaccacagtgcaggccctgcccttcggggctcacagcccagtgggggattagacatgtctttgcgcttccacacacgctgacgggactgtgctccccacagccactgcatccggctctgtgccagctgatggtgccgtgattccccgccggagcctccaatagcagcaatgatcatgataaccacgagaacagcagcaacttgtagctattcattattgagtgctttctatgcctgggtgagctccagaaggttttctgaatttttctcattgatcttcccccacactctaggaggtggatcttatcattatatgatgtccatgttatggacaaggaaactgagctagagcaaggtcatgcaggtagaaagtggagaaacaaacactggaagctagaaaccagattccagttccacgctcttcatccacacggccccggcggggctccttggccacacgttggcatgaagcacgagtccacctgtgcgcatcctttccagtaaccttggaggaaccccgagaggcctgagcaagcttttgcaaacctcggcgctacagccctggcgccagagggctgcaattggaaggcaggcagttaccggaagaagagcgtttccttgactctcccagcgtgacctcatgtctaatcaaagtcggctcctgttttctgcaggattagtcagcatctcttaactagcagtcccggccaggagagctcctcagccacgttcccagcccgtcctccaccctcccatcttcagctgccacagcacttttctcttcctttctgtgttgttttggtgctgggtggactttgaagggggccattaagggctgggtgtggcaaacacaccagactcagcacccagcgaggtctaggcatggccacgggatggcaccactgtgaccccggcaaggaaaataagaaaggtgcatatcggctgggtgtggcggctcacgcctgtgatcccagcactttgggaggcagaggtgagaggatcacctgaggtcaggagttcgagaccagcctgggcaacatgatgaaaccccatctttactaaaaatacaaacactagccgggcgcggtggcaggtgcctgtaatcccagctactcgggaggctgaggcaggagaattgcttgaacccgggaggcggaggttgcagtgagccgagatcgtgctactgcactccagcctgggcaacagagtgagactccgcctcaaaaaaaaaaagaaaaagaaaatatcagggggagaaggtggcatctgttctatgtttgagaaggcagctggacttcccattgaaggaggcgccgcagtctccccacatggacagaggagaaccaggctattggggtgagaccagtgcttgtgcttcccaagtggtctgggttctgcctccatactggctgcagtctgtccccacggacatagctgccgtgagaaggttctcaccagcctggggccccacagccaaggctgggccctgaggtctgccgttctagggtggcggatgctctcgaatgggactctcagcctgggcttcgttgctcttcaagggacacacaaagctcctgaaactgtggataaaccttggtgtgcattttctggggaggtctttattggatttttcaaagggtccatggcccccacaaaagttaagaacctctacattttcactccaggggacttgggccaaatggccatccaagcctgctgcggggtagcctgagccctcgagaggccgccagccagccctggcattcccagtggggggactctgaatgggcacctgcccttctgatctttgggaatccctgtcatgaccctgaggtcagggtttccttccctcttcacacagagaatgtcaccaatggcacagtgggcggcacagcagagccggggcacgaggaggtgagctggatgaacggctggctcagctgccaggcccaggacgagatgctaaatttggccttcactgtgggctcctttctgctcagtgccatcaccctgcccctgggtatcgtcatggacaagtatggcccgaggaagctcaggctgctgggcaggtcagtgtgggtcccttagggggcagggagtgggcaggtggaccccctgggctgagttccccacagaagggtatcctggtcgtacctgatatcaggtgtactgtggagctccctgaaggccctccagaatggagttcctaccccgtccgccaccgaatcagcaggtactgtggtcctcgccgtgctccagtactgaataagaaaagctccaggctccaggccgcccagggaccggagctgcttgtcactaagaacatgtgtttcccatccctttgtagttcataagcatgataattggggtttccctcgcatgtgtgagacatgcttccctcaaaccttgttacgaagctggcacagtatccatctgatgagaaaaaaaaccaacaacactggtttccacagcccgtttgaccttatagctccaccagaaaaaagattttcaacacgtacccccaatataataagcacatggaattataaatgatgtatatctgtgctctttttttttttttttttttcaagacggagtcttgctgtgtcgcccaggctggagtgcagtggcgtgatctcggctcacggcaacctctgcctccccagttcaagcaattctcctgtctcaccctcccgagtagctgggattacaggcgcctgccaccacacccagctaatttttatatttttcatatttatttatttatttatttatttatttatttatttatttattgagatggagtctccctctgtcgcccaggctggagtgcagtggcgcgatctcggctcactgcaagctccgcctcccgggttcacgctattctcctgcctcagcctcccgagtagctgggaccacaggcgcccgccaccacgcccggctaattttttgtatttttagtagagacggggtttcactgtgttagccaggatggtctcgatctcctgaccttgtgatccgcccgcctcggcctcccaaagtgctgggattacaggcgtgagccatcgtgcctggcccctatgccattcttttttttttttttttccttttgagttggagttttgctgttgttgcccaagcaactggagctggagtgcagtggctcccggccccctatgccattcttaatgtgctttataatacatatacaaaaatataaatgaaaatgggctgggcacggtggcttacactggtaatcccagctttttgggaggcagagttgggtgggtcacctgaggccaggagttcgagaccagcctggccaacatggtgaaaccctgtctccactaaaaatagaaaaattagccacgcgtggtggtgggcgcctgtaatatcccagctacttgggaggctgaggcaggagaaatgcttgaacctgggaggcggaggttgcagtgagccgagatcgcgccactgcactccagcccgggtgacagagcaaggctctgtctcaagaaaaaccaaaaaccaaaaacaaaaacaaaacaataacactgaataaagtcataatggtaaataacattgcgtttctgcttggttttagcgcctgcttcgcggtttcctgcttgctgattgcgtacggagcaagtaaaccaaacggtgagtgtcctctccctccatcttctgtcagggaccggggagagagtgccctgagctgctcccaggcccacctgctcttggacactgtcctgggcctgctgctccctgctcaagttagaggggacacctgttacgcctctactcagttacttatctcaaatagacggcgagatcagagagcagccaccccagacaggagcttccagggtatgagcaacttccatctcatcaccaaaccaagccagtccctcactgatgccaacctgagaggcaagttctaagaaccaggccggctgcaggggcatggtcatcggtgtgtgcagaagtcacaagctgagtcccctccaggcagcacaggtcaaagcatgaaggatggcttagaagccacctggtccccaaccctgttcaaggatttgtagagcaaacaccaaaagaggactcgagtttcaccaaaatcttagccaggctcatctactgattttcaggaacctgtatttttggtttcagtgaagtagcttccttaggcctcctgctcgctgctgtttgtttttttgttgttgttgttttgttttgttttgttttgttttgttttagagacagggtctctctctgtcaccctggctggagtgcagtggtgcagtcacagcttactgcaccctggacctcccaggctcaagcgatcgtcccacttcagcctccagagtagctgggactacaggcacgcacacacacagctagctaattttttttttgttgttgttgagacagagtctccctctgtcgcccgggctggagtgcaatggcgcaatctcagctcactgcaacctccacctcccgggttcacgccattctcctgcctcagcctcctgtgtagttgggaccacgggcacccgccaccacgcctggctaattttttgtatttttattagagatggggtttcactgtgttaaccaggatggtcttgatctcctgacctcgtgatccacctgcctcagcctcccaaagtgctgggattacaggcgtgagccaccgcgcctggcttcacctggctaatttttaacttttttttagaaatggggtctcactttgttgcccaggctggtcttgaacccctgggctcaagcaattctcctgcttcagcctcccaaagtgttgggattctaggtgtgagtcactgcgcctggacactgctaatattaattggagaaaagaagatgggtgtgcagctttttcaagagcccacgctttgtgaaataggcaagaggaggctgggcatggtggcttatgcctgtaatcttagcgctttgggaggctgagatcggcagatcacccgaggccaggagttcgagaccagcctggccaacatggcaagacatacaaaaattagccgggtgtggtggcgcatgcctgtaatcccggctacttgggaggctgaggcaggaggatcacttgaacccgggagtcagaggttgcagtgagccaggatcgtgccattgcactccagcctgggtgacaagagcaaaactacgtctcgattaaaaaagaaaaagaaataggcctagaggagggggtgagaaaggggcagttccactccccagatgtcaggtactaaccccggcctgcgtttactggatttactgggagcctgcaccgcgcaggactctgggctggtcccggcttccctggagctcagctggggtctccactcacgagctttccatgtccctgcagctctctccgtgctcatcttcatcgccctggctctgaatggctttggtgggatgtgtatgaccttcacctcattaacagtgagtacagattttttaaagctctgtagttcagtaatctgtttctaaatttgaggccgctttgattggtttctgtttccttgccttccatgtgcctgcatgtgcctgggtgtcccaaacagtagaggggctatgggcgaggtggcctggcagggcctcctcagctgaggtccacaggcagcagggcgtggcttcacaatcccttgcctttttttttttttttgagacggagtcttgctctgtcgcccaggctggagtgcagtggggggatctcggctcactgcaacctccgcgtcccaggttcaagcgattctcctgcctcagcctcccgagtagctgggactatgggcgtgcgccaccacacccggctaatttttgtatttttagtacacatggggtttcgccatgttggtcaggctggtctcaaactcctgacctcaggtgatccacccgccttggcctcccaaagcgctggggtgacaggcgtgagccacctggcctggccgacattccctgccttctgatctgggctttgatgctgcggaagcagctcactagccttgtgcccaaggaaggcagaggcaggaagacaaaacgctgccgcccactttcttttcctgttttcctcggcagctgtcatcagggtctccgggagcttcggctcatggagcagcctgaccacccgcctcccgtggaactgcctcaacctttgcctttgtccggagccagatggaaaatgcagggaacatctggtcttctgctcctcttgtttcctccgtgcccgggcacagacagtcgcctgggggagatgttttctcggggtactaagcacccccttgttgggagccccaggacatcacaaaatatgctccttcttgatgtcagggaggcagaaggaagatggggttgaaagaaagaaagtcaaaaaaggggctgggcatggtggctcacacctgaaatcccagcactttgggagactgaggcaggcggatcacttgaggtcaggagtttgagaccagcctggccaacatggtgaaaccccgtctctactaaaaaatacaaaaattagccgggcgggtggtgcatgcctgtaatcccagctactcggaggctgaggcgggagaattgctggaacctgggaggcggaggttgccgtgagccaagatcaagccactgcactccagcctgggcgacagagccagactctgtctcaaaaacaacaacaaaaaagaaagtcaaaagaggaaccaaaaagtctctcccagagggaagaagggaactctctgtgggctcgcccagttgggcaatcgtgccattccgagctggccattgggaaagaagtgagaataatagcttcttcagagaggcttctgtccatcaaggaaacctcgcctgcatcagtttaccggtgaaaaagtttctaagacacagtacctaccattactatttgtggtacactctggtttctgatttcccttgtcgtgccattgaagggttcttgtttagctttgagggagctctgggggcttctggacctcttcttttttcctttttcttttttttttttttgagtctgctcggttgcccaggctggagtgcagtgacgcaatcttggctcactgcaacctccgcctcccgggttcaggcaattctcctacctcagcctcccgagtagttgggactataggcgtgcaccatcacgcctcgctaatttttgtatttttagtagagacggggtttcaccatgttggccaggctggtctcatacccctgatctcagccaatctgcccgcctcagcctcccaaagtgctgggatgacaggcgtgagccacggcgctcggccgaaaaccagcagctctttcatcagcatgaaaactaaaaacctggcctcacctccattattttagtcacgcgacgcctctgtcacggcaggcctgaatttcagggataaaggaacgagatggtccttgagcttgaggacctcacaccccgaaatgccgagaggtgttttgtctgaaaaacgaccaagaatccctgttaagaaagactttaggccgggtgcggtggctcacacctgtaatcccagcactccgggaggccgatgggggtggtggatcatgaggtcaggagttcgagaccagcctggcccaagatagtgaaaccccgtctctactaaaatatacaaaaattagctgggcacagtggtgggtccctggaatcccagctacttgggaggctgaggcaggagaatcgcttgaggccgggaggcggagtttgcagtgagccgagatcgcgccactgaactccagcctgggtgacaagatcaagactccccctcaaaaaaaaaaaaaggaaaaaaagaaagactttaaaagggaccctgcggttggagctaataggccagtaagaattctttgtctttttttatgttttataattataaaacaaaatttttttcattacattttttattttcattttttacagatggggtcttactatgttgaccaggctggtctcaaactcctgggctcaacagatcctcccaccttgacctcccaaagtgctgggattccaggtgtgagccaccatacctggcccaaaaatgattttattttaaaaattcaggttgggagcagttgctcacacctgtaatcccagcactttgggaggctaaggtgggaggatcatttgaggccagggttgagaccagcctgggcaacatagcgagacaccttgtctctccaatttttttttttttttaattagccagggcatggtggcagttgcttgtagtcccagctcctcgggaggctgaggtgggaggaaggcttgagcccagaagttccaggccacagtatgccacaatgacaccactatattccagcctgtgtgacagagcgagaccttgtcccaaaaataaaagtaaaaatttaacatttcagaaatatgaattgtagactaaacttctatgagcctgccaggcgcagtggctcacacctgtaatcccagcactttgggaggctgagaaggttcccatcacctgaggtcaggagttcgagaccagcctggccaacatggtgaaatgaaaccccatctctactaaaaatacaaaaatattactcgggcatggtggcacacgcctgtaatcccagctacttgggagactgaggcaggagaatcgcttgaacctgggtggcggaggttgcagtgagccgagaccgcggcattgcattccagcctgggcaacaagagcgaaactccgtttaaaaaaaaaaaattctatcagcctgtcttcatcagtttggaatatatttcttcagtatttaaaagatctgcatgtaccagtgttattctttttttttttcttaaaaaaaaaagaactgtgataacttgccttttcccttaatgtatcttttacatcctttcctgtcagtacttagagatctgccttattattaagcagttctgtatattattctttaatatagatggaccatcatttattcaacctgtttccaactaatggacttttggcttggttcccaatttttccaatttatgaatgctgctgaagtgagcatccctgtacatgtatttctgtaaaataagttcctggcagccctgggccacaggattagcatgttttaaaatttaatatgtactgttaaatagtcttctaaaaatgttatctggccgggcgcagtggctcacgcctgtaatcccagcactttgggaggctgaggcgggcagatcacctgaggtcaggagtttgagaccagcctgaccagtatggtgaaaccccgtctctactaaaaatacaaaaattagctgggcttggtggagggcgcctgtaatcccagctacttgggaggctgaggcaggagaatcgcttgaacccgggaggcagaggttgcagcgagtcgagattgcgccactgcactccggcctgggcgacgagtgaaattctgtctcaaaaaaaagcctgcctgccaccacaggcccaccagcacgtacacgagtgtcttttcctccatgtcccttccagtgccatgtcattcctctttaaaacatagccactctgatcctatgaaaaacgacatgccatttttaaaatttatttcattattagtgagacagagcattttttctcctctttattggtaaattgcatttcttctgtgaattgcttctttgtgtcatttgtctatttttctacagtgctcttgattttattattattagtatttagtgactcgtaagagctctttcaaatacaaagacactagtgttctttccgagtgagcaggagatcttaccctggggttttcaggtctctacatggtccatgagtaagcttcaggagagccgtgcacacccttgaaattccatgccaacaaagcgtgtgtaggtgctgctcagctgtgtctttctggaggggagggtccattactttcactggcctctggcaggtctgtgtgaaggctaaaaaccactgcggtggccgggtgcggtggctcacacctgtaatcccagcactttgggaggccaaggtgggtggatcacctgaggccaggagttcaagaccagcctggccaacatgatgaaacccaatctgtactaaacatgcaaaaattagcctgggatggtggcatgttcctgtaattccagctactcgggaggctgaggtgggagaattgcttgaacccgggaggcggaggttgcagtgagctgagatcgcaccactgcactccagcctgggtggcagagtgagactccgtcttaaaaaaaaaaacaaaacacacaaaccactgtggcaggagcgtttctattcactctttgctctcccactggaggcaaaaagctacacaggctagagagtgaccaggcaagagagtcacctgatcaccatttgaagcgtttggctaccagaggtctgtctaagggaggctgttggtttgttcttcaaggttttcattttttgatctagagcaggagtcagcaaaccgccattgccaggccaaatccagaccactgcctgtttttgtaaacaaaacttcatggggtagagctgtgcctgtttgctcctgtctgtggctgcttttgtggtatctcatcagagtcaacgcagtcgtgacagaggccatatggcttgtaaagcccaaaaggtctactgtcttagccaggcacactagctcacgcctgtaaccccagcactttgggaggctgaggcgggtggatcacctgagctcatgagtttgagagcaggctggccaacatggtgaaaccccgtctctactaaaaatgcaaaaattagccagatgtggtggtgggcgcctgtagtccccacgactcaggaggctgaggcaggagaattgcttgaacccgggaggcagaggttgcagtgagctgagattgtgccactgcactccagcatgggtgacagagcgagactctgactcaaaaaaaaaaaagtctattgtctggccctttatggaaaaagtttgccaacccttggtccagaggccccaggaagctgctacgtcactgttcctcgtctgagggcatgtgctgacacccaccattcacacccacaccctctggttgcatgggccagctctccttctaagtcatctctttctgcctccccccagggtggagggagttccatgggcattcccctgccccctgaggcctctgatgagggctccagtgcctgctccttgagaacagaccccaaaagggaaatgaggtcagtgaggacagggctgaagcagttaagcaacactcttgggctgactggggcttctgctgagcagagccgaatctcattctgatacaacccaggacttcagaaagcagaactgtcgggatcagctcccagagacgccaagctcagggcacaatggcactttctgtttgtgtctcccacccgtgttctaatttgggggacaaaggagtctccagggtcgcctttaggaatttctaactccaatcttcaacaaccatgttggggctgtggataatagctctgtgataacccaggactctaggggacggcgttgctgtggaagccttaattcggggacttcctgggtcccggggcctttgtgctgcatgggctgtggtctaaatacagatgaccaggggctgcgagctgttacccccactggtaggagagggggctccaagcgggcacacgccttttccttgtagtccagaaggagatggccatgagccatccttccagagcccaagaggtcggcacccatggtggtatttccctcccaagtggaggctccgaggggcaagggtggctgtcgcgtcaggtaggctgcccagtagccagtgctggctctcccagggccctgcagcacagggcctgggccatcgcgtgccatccgtggagggcggacgccaggtcactccatgggggcagagcactccccacggtgtggatcctcagcctcccccgggacatctggacggcacgctcagtgtttgttcagtgcctcgcgtttgtacagccctttgcactcgcttcatcggctggagcacaaacacggccggcggctgaggccgcatcttggggtcgccaccctccaacccggagcctgggttgcttagagatgggagcagctgtagccaaaattgtgaacctgccatttccactccattactctgacccctgtccccgtgggtgggatggggatttctcagcagaagccacacagaaaagcgggtttcaaaatgttgccaggctccccgatgagacatttctctgtggattttcccttttgattccttcaagtctgactttaaacctgaggaaggcatgatttcatgggaggtgggatctgagggaagtgaagaggataaacatccctcttcagatcctggagaggagggcaggatggcagatgcccccagagaggggacaggagtttagtgccgtggctcagtagaccccgcgtctgcagccaggagagggtcccacggtggcccccggccagctctggagggtccaggagagggtcccgcggtggcccccggccagctctggagggtctaggtgcctggtgagcgggacttgccagtgcccagtgcctgctgtgcctccccaccttcctctctttctgtcctgtaccttggggaagctcaggcagtcagctacttgccattggtttggggagaatttgccatctgagggttctgcctcatgaatttgctgcagtatgtgaccacgttcagacggaaagggcagcggtattggcaggactggacccggccgggaaggcacaggaggtggccgggggaggggagcacacccttcccctcccttcagcactgaagcagaaaggtgaccacaaggaccttgtcccgggcagcatgtgcttggaggtgcccggttgttgtgggtaggaaacagcccagcctggcagagtctacctgtgcagtctggttccgggatcccggcctgtgcaggttgtacagaactctgggtgtgtactccagccacttggggacaaggctccctctggaggggacccgagggccagaatgccagcccccacccaccacccagctccccagcccccacccacctcccagctccgcagcccccacccaccacccagctccccagcctcctgcaggccagggaggactcgggagtccgtggatgtggaaagtcagggccgggggtgccacggttgccccttgtttctgcctgccagcaatgccatggcctgccctgggccaaaaggcacgtacgtccggcatcttagagaagctcccgcgcccgcactgtcccagggccttggccctgcaggcactcctgtccggtggtcatgctctatggccagaatgccaggggaggggccgcctgcagctgctgttttcccctctgggaaggtcacacagtccggcctgtttatgctgcagccagggggctgaaagagagagagtcacgggcttccctgtgtgactgaggctgcgtggaggcagtgagtgaacagcccgggctggcaggacaggttgacccgcacggaggcagaggcggcgagggggctgtgggaagcacctgagggcgggaagaggggcttgcactcccacctgtgagtgtggtggtgagtcaggaaacagctccggcttcctgcttggcagcaaagctggtccttcccctcctggggtccttcccctccgccagccctcgaggcccgcgctagggcgctctgctcagcgctcagccctcactccggcaccgcggcttcgaacagccattatgcgcagctgagaccggtggaggcagggaagctggggacggagtgagcgagagggggaatgtggggagtgacccagatgtcaggatgacctacgggagtccacaggcaaatgcaagcccatccgatgctgtggcgctggaccatggggaggtcagccgaaggcaacagcaggaggtgagggcagggggcagatgggtctaaaaggagcttcagaaggaatgtaagccatctctagttggggactgggcattgtggtatccccctgtagtctcagctgctcaggaggctgaggtgggcagatgagttgagcccaggagttctgcacaatagcgtgctgtgttgatgagatgtctacactaagttcagcatcagtgtggtgacctccggggggtgagggacccccaggttgcctaaggagggctgaaccggcccaggtcagaaacagagcaggtcaaaagtgtcctgctgatcagtagagggatcatgcctgtgaatagccactgcgctccagcctgggcaatacagcatgacctcatctccaaaaacaaatttaaaaaaatgaccgggcgcggtggctcacgcctgtcatcccagcactttgggaggccgaggcggatggatcacctgaagtcaggagttcgagaccagcctggccaacatggcgaaactccatctctactcaaaatacaaaaaaaaaattagctgggcatcgtggcaggtgcctgtaatcccagctactcgggaggctgaggcaggagaatcgcttgaaccagggaggtggagcttgaagtgagctgagattgtgctgctgcactgtagccttggcgacagagtgaggctctgtctcaaaaaataaataagtaaatgaatgaaaaataaacctctagttgaagggcgcagattggatcttaataaggcacatgtaaaagccgtgggatccaaactgaagtgtgtattggccggagccacaggagactccagagaggcagcgtggcctggggcctacacacagaggcttggcctggcttgaatccccaatctgaccattactagcttgggggagtcccttgacttttctaatctttaagtttttgttttgttttgttttgttttgttttttgaggcagagtttcactcttgttgcccagactggagtgcaatggcgcgatctcaactcactgccacctctgcctcctgggttcaagcgattctcctgcctcagcctgccgagtagctgggattacaggtgcacgccaccacgcctggctaattttttgtatttttagtagagatggggtttcaccgtattggccaggctggtctcgaactcctgacctcaggtgatcccctgcctcggcctcccaaagtgctgggattacaggtgtgagccaccgcgcccggcctcatggtgttttttgaccaataaaagtttttaaataggtggtcaaaagtgtgtttcagcttttagggagtacctagcatttgtgtcaaatgaaacctctctgaagagaacatgaaggatgaccttgaccagtgaaacccaaagcataaacatcctgacagcagtcaatgtgtggtcacaacagaataacaaggacaggagaagaaaggccatctctgtggacactaattatttatttaaaggggaatactaatttgtgttttatcctgtagtcggcttccttttcttcctcccagagctgtggttcctgccagaggacacttccctcgttggctgtgcccaggagcagcttgaccagaagattttccctgttatgaagtcataacacatatcataatagtaactattgttaatacctaccctatttatgatctttaaaaccctcggccgggcgcagtggctcacgcctgtaatcccagcactttgggaggctgaggcgggtggatcacctgaggtcaggagttcgagaccagcctggccaacatggtgaaaccctgtctctactaaaaatacaaaaattagccgggtgtggtggcgggtgcctgtaatcccagctacttgggaggctgaggcaggagaatcgcatgaacccgggaggtggaggttgcggtgagccgagattgcaccattgcactccagcctgggcaataagagcgaaactccatctcaaaaaaaaaaaaaaaaactgaaaaaacaaaacaccatgaattaagaagttaaatgacaaactaggaaaatttattcatagtatatagaactgtgaatgtcttcattttattttatttttattaatttttgagacaagagtctcgctctgtcgcccaggctggagtgcagtggcacaatctcggctcattgcaacctctgcctctggggttcaagcgatttttctgcctcagcttcccaagtagctaggattacaggtgcctgccaccatgtccggctaatttttgtatttttagtaaagacgaggtttcactatgttggccaggctggtctcaaacccctgacctcaggtgatccgcttgcctcggcctctgaaagtgctgggattacaggtgtgagccaccgtgcccggcctgtgaatgaatgtctttaatacataaagagccttcacaaaatcaatatacaaagattggccgggtgcagtggctcatgcctgtaatcattgcagtttgggaagccaaggtggaaggatcgctggaatccaggagttcaagaccagcctgggcaatagagtgagaccctgtctctataaaaataattaaaacaaagctgaaggagaccttgctatgcagccccctgccgcttgtgcacccttgtcgacccacacgcaccttcaggagggcggcgcacacctggggtagtcacagtgcaggactctggctcaatagcgcctttgcattggtttggaccttcgggagggcggtacacgtctggggtagtctcagtgcaggactctggctcaatagtgcctttgcattggttgggaccttcgggaaggcagtgcatgcctggggtagtctcggtgcagaaggactctggctcagtagcacctttgcatcagtttggaccttcgggagggcggtgcagaaggactctggctcaatagtggctttgcatcggtttggaccttccggagggtggtacacgcctggggtagtctcagtgcaggactctggctcaatagcacctttgcattggtttggaccttcgggagggcagtacatgtctggggtagtctcaatgcaggactctggctcagtagcgcctttgcattggtttggaccttcgggagggcggtgcatgcctggggtagtctcagtgcacgactctggctcagtagcgcctttgcatcgttttggacctttgggagggcggtgcatgcctggggtagtctcggtgcagaagggctctggctcagtagcgcctttgcatcagtttggccttggctcccagcactggttgtttccggcggggttgtcggctgtgtgaagcaggccgtgtgcctctctggctgtggggctctgttcggtggtgtagcaggcctgagtgcttattagccatctcgggatccagggaacatttgggttttcccagctacacctggaaacttggcgggcatatgggaatgagattctaccactctggaagattcatgcccacaggtttcattgcagtttgctgatggtccgcaagcctgaaattagcgtgtggaacagacccctttggtagcagtctagtgccagctcagacctacgaagaattaaaaatctgcaaacttccactatttcaatgtttaagggaaataaatgcagcatttttgcatttctgacattttacttaaaacaaacaaacaaacnnnnnnnnnnnnnnnnnnnnnnnnnnnnnnnnnnnnnnnnnnnnnnnnnnnnnnnnnnnnnnnnnnnnnnnnnnnnnnnnnnnnnnnnnnnnnnnnnnnnnnnnnnnnnnnnnnnnnnnnnnnnnnnnnnnnnnnnnnnnnnnnnnnnnnnnnnnnnnnnnnnnnnnnnnnnnnnnnnnnnnnnnnnnnnnnnnnnnnnnnnnnnnnnnnnnnnnnnnnnnnnnnnnnnnnnnnnnnnnnnnnnnnnnnnnnnnnnnnnnnnnnnnnnnnnnnnnnnnnnnnnnnnnnnnnnnnnnnnnnnnnnnnnnnnnnnnnnnnnnnnnnnnnnnnnnnnnnnnnnnnnnnnnnnnnnnnnnnnnnnnnnnnnnnnnnnnnnnnnnnnnnnnnnnnnnnnnnnnnnnnnnnnnnnnnnnnnnnnnnnnnnnnnnnnnnnnnnnnnnnnnnnnnnnnnnnnnnnnnnnnnnnnnnnnnnnnnnnnnnnnnnnnnnnnnnnnnnnnnnnnnnnnnnnnnnnnnnnnnnnnnnnnnnnnnnnnnnnnnnnnnnnnnnnnnnnnnnnnnnnnnnnnnnnnnnnnnnnnnnnnnnnnnnnnnnnnnnnnnnnnnnnnnnnnnnnnnnnnnnnnnnnnnnnnnnnnnnnnnnnnnnnnnnnnnnnnnnnnnnnnnnnnnnnnnnnnnnnnnnnnnnnnnnnnnnnnnnnnnnnnnnnnnnnnnnnnnnnnnnnnnnnnnnnnnnnnnnnnnnnnnnnnnnnnnnnnnnnnnnnnnnnnnnnnnnnnnnnnnnnnnnnnnnnnnnnnnnnnnnnnnnnnnnnnnnnnnnnnnnnnnnnnnnnnnnnnnnnnnnnnnnnnnnnnnnnnnnnnnnnnnnnnnnnnnnnnnnnnnnnnnnnnnnnnnnnnnnnnnnnnnnnnnnnnctctgtcacccaggctggagtgcagtggcgcaatctcagctcactgcaagctctgcctcccaggttcacgccattctcccgtctcagcctcccgagtagctgggactacaggcgcccgccaccacgcccagctaattttttgtatttttagtagagacggggtttcactgtgttagcgaggatggtctcgatctcctgacctcatgatccacccgcctcagcttcccaaagtgctgggattacaggcgtgagccaccgcgcctggccaaataattttttaagttgtagaaaaatgttgaaagtcattagtaaaagttttttgtttttttgagacggagtctaactgtgttgcccaggctggagtgcagtggctcagtctctgctcactgcaacctctatctcccaagttcaagcgattctgctgcttcagcctcccaagtagctgggactacaggtgcctgccaccacgcccagctaattttctttatttttggtagagacagggtttcaccatgttggccaggctggtcttgaactgctggcctcaagtgatccacctgcctcagcctcctaaagtgctgggattatagatgtgagccactgcgtctggcctcagggtgatttttaccttattctttttatactttgctccaaacattttgcaatggatatgcttttcttttctttttttgagacagagtctcactctgtcgccaggctggagtgcagtggcatgatcttggctcattgcaacctctgccccctgggttcaagcaatcctcctgcttcagcctcccaagtacctgggactacaggtgcacgccgccacacccggctaatttttggtatttttaatagagatggggtttcaccatgttggccaggatggtctcgatctcgtgatccgcccacctcagcctcccaaagtgttgcgattacaggcgtgagccaccgcgcccagcccaggcattgccgttctaaggaaaagatcataattaaaaatacaagatgtcagtgttggtttgaaggctacctagtgtggttcccctgaggcactctactccctaaggaatggccctgctgaccagaataacatgttgggaagaattttcttggtgctggtaagaatgttccaggcggcaagaggcagggcatcaaagggagcagctgggaggcccctgccctgtccaggcctgagggcaaggcctcatccatggacagatggagagtcggcctcttccccaggttctgctcttccccatcctggatctagtgctggggagaagactccagaagaccaggcagggccacatggtcaccccagggccctgtggctctgttggtctgtagcctaggttagggttaaggcaggcaggcttgagattaaaaaggtagaaggaaaatgcctagctagcaagctctctgcttttccggaacattctctagctctgttgaaaagtttgagacactctttttacccaaaggtgactgcagcaacctacatgttagcctcacctgaccctgcaccaagggagccaggctctgggcttccatttgcccttctggttgggttccaagccttctctgggcctcccttttttttttttttgagacagagtctcgttctgtcacccaggctggagtgcagtggcatgatctcggctcactgcaacctctgcctcctggattcaagcaattctgcctcagcctcttccccagtagctgggactacaggcacccaccaccacgcccagctaatttttgtatttctagtagagacaaggtttcactgtgttggccaagctggtctcaagctcctgacctcatggtccacctgcctcggcctcccaaagcgttgggattacaggcgtgagccaccgcgcctggcccctttctttctttctttctttgcgccggctgtgctggcatgccgggcaggaacacttccctccttccgcataagcagaacaaatatttgcattctcactggggtagatatggccacggagatgcctttgctacagtgcagtaatggagcagcccaaatatgtgagcttgggaaccgaggcttgtcctttgaactgcaacctacctgggaggcaggtacccagagagtaagattgctcacctgggcgtgcctgggcacgtgtgagcacatcacatttcttttgtcttctgttggaagggatttcttttcttttctttttcttttttcttttttttttctttttgagacggagtctcactctgtcgcccagggtggagggcagtggcgatatcttgactcactgcaagctctgcctcccaagttcaagtgattctcctgtctcagcctcctgagtagctgggattacaggtgcccgccattatgcccagctaatttttgcatttttgtagagatggggtttcaccattttggccaggctggtctcgaactcctgacctcaggtgatccgcccaccttggcctcccaaagtgctgggattacaggcgtgagccacctcgcccggcctcatttcttttttttttttgagtcttgctctgtcgcccaggctggagtgcagtggcacaatcttggctcactgcaacctccaccacccgggttcaagcaattctcctgcctcagcctcccaagtagctgggattacaggtgcacgtcaccatgcctggctaatttttgcatttttttagcagggacggggtttcaccatgttcgccaggctggtcttgaactcctgatcttgtgatctgcccacctcggcctcccaaagtgctgggattacaggcgtgagccaccgtgcccagcctcttttttttaaaacgtagtcttgctctgttgcgcaggctggagtgcagtggcacgatctcggctcactgcaacccccgcctgggttcaagtgattctcctgcctcagcctcccgagtagctgggattacaggcatgttccaccatacctcgctaagtttttgtatttttggtagagacggggtctcactatgttccctaggctggtctggaactcctgacctcgtgatccgcccgcttcggcctcccaaagtgctgggatgacaggcgtgagccaccgcgcctggcctcactgtgactttttggtgtcctaatgggtatcaagtggtatctcattgtggctttgatttgaatttcactatgattaatgatgttgagcatctttccatatgcttattggccatttgtatatcttctttggagaaatgtctattcagatcctttgcccatttaaaaaattggttatttcaaaaaatagctgggcgtggtggcacatacctgcaatgggaggtgccgctcgggaggctgaggtgggagaatggcatgaacccaggagacagaggttggagtgggccgagatcgcaccactgcactccagcctgggagacagagcgagactccatctaaaaaaaaaaattggttatttatctttttattattgagatgtaggggttctttatatgttctattttttgttttttgaataactgttgggcactatgtttatatattctagatgcaagctcttgatctgtgatttgtaagaagtttctcccattctgtgcattcttttcactttcttgaactcctgccctcaagtaatcccgctgccccagccttccaaagtgctgggatgacaggcacgagccaccactcccagcctgttttcactttcttttttttttgagatggagtctcgcactcttgcccaggctagagtgcagtggatcaatgtcagctcactgcaacctccatctcccggttcaagggattctcctgtctcagcctcccgagtagctgggattacaggcgtccaccaccacgcccggctaattttttgtatttttagtagagatagggtttccccatgttggccaggctggtgttgaactgctgacctcgtgatctgcctgcctcggcctcccaaagtgcggggatgacaggtgtgagccaccgcgcccggctctcttttcactttcttgatgccatcctttgaagcacagaggttttaaattttgctgacatcccttactcatttttaaaagtgggcaaaacaggcagcagtgactgcagacaggtatgtcgccaagttcaaactccctccgctcagtaacagttaatttgcttgcaggcaggcaggtttgataaaacaaaaattatttattttgggaggccaaggtgggagaagagcttgaggccaggagttcaagtctagcctgggcaatatagtgagaccccatctctacaaaaataattaaaggccgggcgtgatggctgatgcctgtaatcccagcactttgggaggccaagatagatggatcgcttgaggtcaggagttcaagaccagcctggcagcatggtgaaaccctatctctactaacaatacaaaaattagccgggcatggtggtgcacacctgtggtcccagccacacaggacgctgaggcaggagactcgcttgaacttgggaggtggaggttgcagagagccaagattgcatgtcagtgcattccagcctgggtgacagagcgataccctgcctccaaaaaaaaaaccactagctggggcatggtggcgtgggcctgttgtcccagtgacttgggagctggggggggaagatcacttgagccaagttggaggctgcagtgagctatgattgcattactgcactcccacctgggcaaccgaatgagaccctgtctctctctctctttttttttttttgacacagagtctcgctctgtcccccaggctggagtgcagtggcgcagtgtcggctcactgcaagctccgcctcccgggttcaagccattttcctgcctcagcctcccaagtagctgggattataggcgcctgcccccgcttccggctcctttttgtttttttcgtagagacagggtttcgccatgtttgccaggctgatctccgaattccctgacctcaggtgatctgccccccttgtctctctctcttttttttaactttaaaaagatacagaggcagggtttcgccatgttgtccaggctggtcttaaactctgaggtcaaaggcagcactctgggattgcaggcgtgagccactgcgtccagcagatcctgtctcttaaaacaagaaaaaaaggccgggtgcggtggctcacgcctgtaatcccagcactttgggaggccaaggcgggcggatcacgaagtcaggagatggagaccatcctggctaacgtggtgaaaccccgtctctactgaaaatacaaaaaaattagccgggtgtggtggcgggcgcctatagtcccagctacacgggaggctgaggcaggagaatggcgtgaacctgggaggcggagcttgcagtgagccgagatcgcgccactgcactccagcccggccgatagagcgagactccgtctcaaaaaaaaaaaaaagaaagaaagaaagaaaaagattcaagacaaatggggagtggtggggagggtggaggggacatagattaagtccccataagcagcctgaatttaatgaaataggttggcatggctatccagagggcagcccccaaggccagggacgctgggtgtggacaggaaaggtttgctacacacagtgtgatgtctcttgaggttagagaacctgtgcctctttgggaggatgtagtttgccctaggcctggatttcggtagaatgagcaagagttagccttgaagtcctgttcaggtgggccccctcttgccctgtacccagaatgagctgatgtgagatgccgagagtggcttcgttgggaagagagcccggaccttgcttcccgttggccttccaggatgctaactgctcgggccgaacatcctgtgggaagataatcccctgcttgtactgagaaattcagaagcaggaggccgggcgcggtggctcacgcctgtagtcccagcactttgggaggccgaggcgggcggatcacttgagatcagcctggccaacatggtgaaaccccgtctctactaaaaatacaaaaattagccaggcatggtggcgggcatctctaatctcgcgacttgggaggctgaggcaggagaatcacttgaaccagggaggcggaggttgcaacgagccgagctcacaccactgcgctccagcctggggaacaagagcaaaaccccatctcaaaacaaagaaaagaaattcagaagcaggaatcctgggccagcttcatcctcagaccgaagagaactgtagaattctgattgacatcttccaaaaacctaccctctccaaaccaaaagcagtttttgctgacatctggtctttctggaatgctgatatttttatttataaaatgatgctattatccccaaatagattcttatttttaacaggctttctccctttgagggctgcctgaggctcataactttgttctctggcatctcagtgttaccctgaaaagacaagaaggctcctgggctctgccaggagcagagagatagggagggttgccagccggaaagtcagacaactgcttgtattctgcattacctccctccttggccccatcagcctcagtccatgaaggagaaaccttcagtgagcggtcattgcccctgaactaatgcccctgtgagtcacacaggaaggggcgcaggtgaagaaggggcctcatggggcctagttctctgtcccctcctcctccccttccctggtgcatcctccccactgaggtttctctgcttcttatctctcagctgcccaacatgttcggcgaccttcggtccacgtttattgccttgatgattgggtcctacgcctcctcggcagtcacctttccaggaatcaaggtgagcacgtgtattttgcactggtgtctgtgcagaggcctgctccaggctccttccaccctctctgaagagggaggcaattgtgggcacccggggtggcccctctccaccacccccacccgggcaggatgcacctgggcatcacaggggcgacaaatgaaaaccgcggggcctcaggggacgggaatcacgcatgtggctgcaggatctgccgcaggtgcctttgcatttcggggctggggcaggggaagggcggtgggtgagtctgtttccagttgtgagtcttgcccccgtctcctccgtcatcctggtctcccgctgctcccctgctccccaacccccagcctgctgttattgtaccgttactccccgccagccaaagcactgctcttggccaagtgtttcagctgtttccctcctaggcaggattttgagcctgtggaagtcacacagggtcaggacgaagcaaacacctcacagtccatcagcccaagttccccagaccctgtgggtctgccagggccccgtaggggcttctcctacctctgaccctcacactaagtaaaagcccctttcctcggtggtgtgtgtgggaatgctgttggcgaggagagggggtcacggtgtgggctggccacctgggcatcgaagtggtgggagctgggactctggggccagccatcctatggacttgcagagattctcatgcccctggactggggagcatcccgaaagttcttcctcctcctttttttgggggggaacagggtcttgctctgtcgcccaggttggagtgcagcagcacgatctcggctcactgcaacctccacctcccaggttcaagtgattctcctgcctcagcctcccaaggagctaggattacaggtgcccgccaccatgcccggctaatttttgtatttttagtagagatggggtttcaccatgttggtcaggctggcctggaactcctgacctcatgatccgcccactttggcctcccaaagtgctgggattacaggcgtgagccaccatgcctggcttccttgagcatttctttggcctctgccatgtgagctctcagaggcactggggaagcatcagtggacggggctggccggttcccgccttcagggagctccgctaataccagacaagccgacggaccaggagcaccgtcccctctgctgggccgatcactatgagcctgcaagacgtgccgtggtcatggcggggcggtcaggaaggcctccgagtcggggggctaatcacacgccaggcccagatgaccagcagggcaggcacggtgggaggactggaaggcgggtgcctgatgccccaacgcccaggctggcagggctgtgcctctttgcgcggctcagcacagggacagcaggggtggccagacgcccctgcctgctgcggctctggcctccccgggctaactctgccccctcccccccccaccccgtccccgcggtgcctgtcagctcatctatgatgctggtgtctccttcatcgtcgtcctcgtggtctgggccggctgctccgggctggttttcctcaactgcttctttaactggccccttgagcccttcccggggccggaggacatggactactcgtaagtagaggtgcccccgtcccgcctgcccccagcccccgccccccagccggggtcccgggcagcacccacagacactctcccggggccccagggtgaagatcaagttcagctggctgggctttgaccacaagatcacagggaagcagttctacaagcaggtgaccacggtgggccggcgcctgagtgtgggcagctccatgaggagtgccaaggagcaggtggcgctgcaggagggccacaagctgtgcctgtccaccgtcgacctggaggtgaagtgccagccggatgctgcaggtacccgcctgagaccgcagccgggcgacgggcagggagtgctctgtgggtatcggctcaccccattcccacctcaccccaaaaggggaggcggccccgcccgccctgttctgcagaggcgctcaggaaggcctgggggagggaaagggatttgcctgatttcacccaagaggtgaccccaccgcagcgccaaccccgttaccctcaccaggcccgtcccgagggccccctcctggcctccagcgtggagggatctgcgtgtccccccggtggtggggacagtgtgccccggccctgagccccgcaccctctccctgcagtggccccctccttcatgcacagcgtgttcagccccatcctgctgctcagcctggtcaccatgtgcgtcacgcagctgcggctcatcttctacatgggggctatgaacaacatcctcaagttcctggtcagcggcgaccagaagacaggtaggtgccccgggcagcctcggtcgctgtcactccccggcctgagcccagcccactggccaccggccggaatgtgttaagctgagccgggccagcggggccatggaaaggccgcatcccaggagctgtctgcccgtcagagctattgcatcactgccagccccaactgtttcttcgtgtccccatcagggtttcctggtccaggagggagggaaggaccaaaatagcctcctgggtgtggggtgtggggtgtgtgttttccagtgcctgagggggagggttgccgtgtgtgtctgtaaatgaaaacagaacagaacgctccacctgagcatggctgaaagacagcaggtcaagcccaaagtcctcccagaaagtggcacggtgggtgcgtggacaccctgggcatcgaggtcaggacggggctggagacgctggggcaactggcccacactgggatctgcatccctcaccgagaaacagggcagggcagagacttcctcggagcttgcgaacagttgaggcttgtcagctccaacaaacacagctgataacccacagtccacttttccaaacagggcaggtcttcagctgattagaggttttgattctacagagaaagtcaggacttccccggggcctgagctgagtcagccttagtcatccccaggcgggacaaacactccaaatcctttttattggcagcctccctggtgtgccactttttccgatggtttccttgtttttatcaaggtgaagataccctaggacttgtgaagaatcagttatcaggtttttaggggatgagaaatccagctttatcaaaaggaaaagatagcaaagggaaccagataacagccagttctactgtgaaaatggtagtctaggccaggcacggtggctcacgcctgtaatcctagcccttttggaggctgaggcaggtggatcatgaggtcaggagttcaagaccagcctggccaagattgtgaaacccccatctctactaaaaatacaaaaaattagccaggcgtggtggtgggcccctgtaatccctgctacttggaaggctgaagcagagaattgcttgaacccaggaggtggaggttgcagtgagccgagattgcgccactgcactccagcctgggcgacagagtgcgactccatctcaaaagaaaaaaaaatatctgtggaacacactttggggaaccctaatctatcatgtctctttctttcttgtttttttgaggcagggtctctttctgcgttgcttaggctggagtgcagtgatgtgaacgctgcagccttgacctcttagggctccccaggtgcgcgccaccacacccagctaatttttaaattctttgcagagatagggtcttgctgtgttgcccaggttggtgtcgaactcctgggctcaagggatcctcccctcttggcctcccaaagtgctgggattacaggcgtaaacctccacacccagcctgataaacattcagccctggagtggcggaaaccccaaagtgtgcagagagagctggtccctggccctcgaaaggctcatctccctgctgctgagtcagcgtcttttactcaagctgtctgagaaatcttttgctgcccaggaggaatgtttccaactgtttcgtatgttcaaaaagtcaatttcaagaagtagaggaagccaggccaggaaggttggtctgtggcagacgaggcactggttttccccctcctccttctgtgacccgttacacccaacacccatagccctagctccggccgagaggcagctgcagggtccgggtcactttccgcacactcgtgagctttgcggctccgcaggagggggtgtgccgtgctgctgaggaacggctcaaagcaccagagccatcgcctccgcgtacggccccgcgaccacccgcggcagaggctcccgggtgctggttccgaatggagactccaggccttgccgctgaccggtgactctgctgcctcccagcgtttgagacccgccatcaaacaggagttgcggattcagggaaaccctaactagccagggtgctggcagctgggaaaaggccgccttttttttttttttttttttgagttggggtcttgctctgccacccaggctggagtgcagtggtgcaactgatagctcaccacggcctccgactcctgagctcaagggatcctcccacctcggcctcctaagtatctgggactacaggtgtgtgccaccatgcctggctaatttgttttttttttttttccataaagacaaggtcttgctatttttcccaggctggtctcaaactcctgggctcaagcagttctcccacctcagcctcccaaagtgctgagattataggcatgagccacaatgcccagccaaaaatacagtcttttttttttgacatggattttcgctcttgtcacccgggctggagcacagtggcatgagctcggctcactgcaacctccgcctctcgggttcaagcgattgttctgcctcagcctcccaagtagctggggttacaggcacctgccaccatgcccagctaatttttgtatttttagtagagacggagtttcaccatgtctccaactcctgacttcaagtgatccacgtgcctcagcctcccaaagtgctgagattacaggcgtgagccacgatgcccagccaaaaagccagtcttgagatggggaagacgtggcccatgctgtcctcagcagtgcccagtcccagccaaagtgggcactgctgcctcactctcccacccaccctcagggtgtggcacttactgggaagaagcaggcattgagaaacagaattgaggaggggaaacagtccagggccaacagtgcttggggattgaggcctgaaaatgggagcagggtacagaggctgtggctggccagatgggtcgggtgccccctgcacccccaccccctagtcaggggccacctgtcctaccctccctttgtaagagttgacaggtgacatgttttcctattgttgtccttgacttgataacaatctaggagttaaatagatactatcatctgtttacgtcatcatttatgatagatactatcatcatatacacctgaaaaacgaggcctggagcgatggaggagcttgttcaaggtcagagccagcactcacatatgggtcttaagacactggagcagccaagggcctctagaccaggacattccactcggagcagcagctcaggggccaccaggcctctgtggcaggggggccatggcccaaggaaggggagcaggcccaggcatggtccccgtttcttggagtggaagggagaccagctctggccatctggaggagacccatggtgtcagatgccttggctgggcgtcaggggcaggttctttgacctttccctctctctgagcacagcaggaggtagatgtgacagagccgcttcccgcaggcagtgtggtgacagggaccctgattgcaccaggtcttccgcatgcccgccacttccccatcacgctacccgccaacgtcacaggcctgattcaccagtccgcctgtgacccggcaccagcagacaggagaatgtcagcaggggcccgggctgggcattgtcccaagtccacttccagaggcctggctgcagctctgcctcccctgagcgccccgagtcacgcttggtgggaaatgcagtgcgggaaacgcagtgcgggaaacgcagtgtgggaaatgcagtgcgtgctgggcatggagtgagcctgcctcctctcccatctctctgtagcactgagatttctgccactaacctctcttctttctgctttttcacttttgctttcttgatgcagtgatggccacgggtaagcggggggtgggggggattgtcagggaatgctgtgatgtcccctcccagccagtctctgttcaacccagaagctcctcacctcaagctccagacatgcctcctggctagagccgtgggggtaaaactggggcaatcaacattcctcgtctgcttccctggaaaatccactgtcattttaagtctttgaatatggaagccctgacatcagagccccgtgagcggtgcctttctgggatatttcttttttttttgagatggagtcttgctctgttgcccagggtggagtgcagaggcatgatcttggctcactgcaaccttcacctcccgggttcaagtgattctccttgtagcctcctgagtagctggggttacaggtgcctgccaccacgcccagctagtttttgtatttttagtagagacggggtttcactgtgttggtcagtctggtctcgaactcctgacctcgtgatccgcccacctcgggctcccaaagtgctgggattacaggcatgagccaccgcgcccagccgttctgggctatttctagaggcagaaactaacggcccgtcacttagcctccgtcacaggagttcccaagttatagcgacttcctggagctctgggaaggccattgtgacactctgggtttcattagctgtttcttagaaacaagcaggggatttggaaccgagaagaaggtgacctgccccgtgctccatcctcaacttcagagttaaggtctccgggctcctcgcaagacccatagtgacagggggttctggggcagaccccagaagagcctgtggggaccagccccttcccagctggtgcccagtccctgctccagggctgtctgccaggcgtccccatgacgcagcgccttcctccacagttggcctctacacctccatcttcggcgtgctccagctgctgtgcctgctgacggcccccgtcattggctacatcatggactggaggctgaaggagtgtgaagacgcctccgaggagcccgaggagaaagacgccaaccagtgcgtaggcagggccggtgccccggctcccagcccgcagcccctgcagaaagaccccagagctgcatgtcaggcacagggtgggtgggacagagggagagagcaatgcactccagctcctcccggagcccttagagagactcactcattcagctcagcatgcgtttcaactgctcccctctttatggaaattgtttggaatgcaatggaaatgctaaagtttgaggccaggtgcggtgactcatgcctgtaatcccagcactttgaaaggctggggtaggaagatcacttgaggccaggagttggagaccagcctgggaaacatggccagcccccactccccgtctctacaaaaaatttaaaaattggccagggagggtggttcatgcctataataccaacactttggaaggttgaggtgagtgaattgcttgagcccaggagttagtgaccagcctggccaatgtggtaaaacccggtctctactaaaaatacaaaaaattagccaggtgcggtggcggcgcgcgcctgtaatcccagctactcaggaggctgaggcgcgagaattgcttgaacccgggaggtggaggttgcagtgagccgagatcacgccattgcacttccagcctgggcaacagagcaagactgtctcaaaaagaaaaaacaataaagaagaagcattgagtaagaaggaagaaaaagagacacaggtgaaagtgtacagacaatggctagcagaccattttgctcctaagaccaccctccctccaccccttggcagtggctacaccatcttaaagcctcccaaagtactgggattaacaggtatgaggcaccgcgcccggctcagatggtgactttcattcattgcattcaatcatgcagcccaccaaccctttgttatctgcctgcaaggtttattccggtcagtttgagtagtaagttgctataaccatattatgtgttaatagagttgttcatgattgtgaagattaaacaaggtactggagtcctactttatgtaagggatgggctccaagatcagaggatgagttaaacgctgttttcttttttctttttctttttttttttttgagacggagtctcgctctgtcgcccaggctggagtgcagtggctctatctcggctcactgcaacctccgcctcccgggttcacaccattctcctgcctcaggctcccaagtagctgggactacaggcgcccgccaccacgcccggctaattttttttaatatatatttttagtagagacaggggtttcacagtgttagacaagatggtcttgatctcctgatcttgtgatccgcttgcctcggcctcccagagtgctgggattacaggcataagccaccacgcccagccaaacgctgttttccatggctccacaccttaatataataagctacggtttattgcctgaggccctccaccgaggactccatgcacagtatctcagtgaagactcccagcaccctggcgaagtggggaccagtgttatacccattttacagatgagggagctgaggctgggacttgcagtagtttgcctagggccgcacagttaggaagtggtgggcctgggactccctgcacatctgtgagcacctggggtccgttcttggatcatccagggtgtctgcgtgggtgtgagactgggatcggtaatcgttcattcacgagagataattgcagagggtgcctggccgggcgcggtggctcacacctgtaatcccagcactttgggaggccaaggcgggtggatcacaaggtcagaagatcgagaccatcctggccaacacggtgaaaccctgtctctacaaaaacgcaaaaattagccgggtaaggtggcgcgtgcctgtagtcccagctactcgggaggctgaggcaggagaatcgcttgaacccaggaggcagaggtggcaatgagccgagatcacaccactgcactccagcccgggtgacagagcgagactccatctcaaaaaaaaacccaaagaacaaaaaaacaaaacaaaacaaaacaaaaaacagtgctgtgctatctaggtcaggtcctgcagccaagaggttatttgtgtccactccagttccatctgctgcctgctcatttcccctttaccctctcctgtccccacaaggggaaacccattcactcccctatttggcttgtatctggcttcttatcagcgtcctgcaagatttgggtgaacttgaagccagtggtgaagtgaggctttgccatgtgccagctcaggcacacgctgctacttctctccccgtcgtcttagctcagccttcacagagcactgcagcatatggatggccatcttcttgtacccgagaccccctccgagagtcacactcagcttgccactgagaagggccggggagtgtccgtagtgctggtccagccccgacacagtccctaaaacgtgcctgggtggcttctgagtcttgcgtcagtttacctgctgcgacgcttgaggcctgacttctcaggagcacccggcttcctccggggagccctcccacccctgcacgttctgtgtctccacagaggcgagaagaaaaagaagaagcgggaccggcagatccagaagatcactaatgccatgcgggccttcgccttcaccaacctgctgctcgtgggctttggggtgacctgcctcattcccaacctgcctctccaggtgggtgtggggagtgggaggggcaggtgggaggtggggcagtcagaaggaacatgtaaagactcaaaagtgtgtaatgtttcatggaagccatcaacaaagcggatgactttctttatttttttgagacagagtcaaactctgttgctcaggctggagtgcagtggtgtgatctcggctcactgcaacctcagcctcctgggttcaagcgattctcctgcctcagcctcccgagtagctgggattacaggtgcgcaccatcacgcccagctaatttttgtattttcagtagagatggggttttgccatgttggccaggctagtctcgaactcctgacctcaggcgatccacccgccttggcctcccaaagtgctgggattttacaggtgtgaggcaccgtgcccagctcagatgatgactttcattcattccactcaaccgagcagcccaccagccctttgttatttgcggagggcctgttccctgccaggctctgtgcttgctgctgcaggtgagctggacacctggattgtcttctgcaaagggactcctccccggaaggcatgtcttggttttgggggcgtcttgcataaccgtggataccaccatcatgccatttcccggaagtgtgtggggtcgctgtagagttccttgttttgtatcggctcaagcagctggaatctgacgtccaaagagatctggccaatctgtggtgttggtgggagcatctgctcccctgtcaccagagtctcacggggtttctacactgaacagagtggaggaagaccttgatggtggcttcatatctggattcaaaagcttcattccaggccggtggctcatgcctgtaatctcaacactttggtaggtggaggcaggtggattgcttgagctcaggagtttgagaccagcctgggcgacttggtgaaaccctgtctctacagaaaatataaaagttagctgggcatggtggcacactcctgtaatcccagctactcgggaggctgaggcaggagaatcatttgaacctgggaggcggaggttgcagtgaactgagatcgcgccactgcactccagcctggatgacagagtgagactctgtctcagaaaaaaaaaccaaaaaaaaccaaaacactttgggaggctgaggcaggtggatcacgaggtcaggagtttgagactagcctatccaaaatggtgaaaccccgtctctactaaaattacaaaaattagctgggcgtggtggcacatgcctgtaatcccagctactcaggagggctgaggcaggagaattgcttgaatccgggtggcagaggttgcagtgagccgagattgcgccactgcactccagcctgggcgacagagtgaggctgtgtctcaaaaaaaaaaaaaaaaactgaatttctttgccaaacttttgaggcttctggaacctgatttttgacagagattttgagtaaggtggcccttgtcacctgcctggctccacccactggtctgtgaaagtggtctagcagtaggttttggcccaatccctaaatttacaaatggtggagggacgcaagtgtggcttttccttccagagaggtgtagcctgagtccagatggcatcttgggtcaagtccaggagggaagtaagagtccctccctttttacaggaggccttgaggtacgttgaacacccaggtgtgccccaccgtgggaactgttgtgtgtacgtgccaacactgggcgtgcagagcgcagcgggccgtggaacatttgtgccggccccagggggtgctgcatccctccggccctccctggcctcctgggctgctttctctgcaagactggcagacctttgccctaaccgccttgtccagtcgaggggcagtgctcagtggggacagtcatctttttgttttatgtaggtctcactgaaagaaaagttgtaaaaaggcaacaaggcatttgaggtggggaggcctgcacagcgtgtgtgtgtgtgtgtgtgtgtgtgtgtgtgtgtgtgggcactgggcacagccctctttcaacactgccaagagcagcccctgcccccccaccacccacattcctgggaacaggtcctggctgctgagcgggatggcagggctgtgtacagaagacaaggcgaccacagggacctggtggccaagaggatggctcttaaaaagtgcctctcagagttggcggagtccgccagcagcagccttcctgggcagggggcctcccacagacagcgacagaactttactaggaccagcctgggcaatatggcgacaccctgtctctactaaaaataaaaattagccaggtgttgtggagtgcacctgtagtcccagctactcaggaggctgaggtgggagaatctcggctcactgcaccccgggaagttgaggctgcagtgaactgagattgcaccagtgcactccagcccgggcaaccggagtgagaccttgtctcaaaaaaaaaaaaaaaaaattagccggcctggtggcacatgcctgtaatcccagctactcaggaggctgagggagaacaatcgcttgaacccaggagacagaggttgcagtgagccgagaccacaccactgcactccagcctggggtgtagagcgagaccgtcccaaaacaaaaccaaacaaaacagaacaaaccacaaaaagaaaacaaaacaaaaagcgaagaaacacttcacgagggaggtgagagggcagccacctgctgggagggccgggtgaccaggcttgggagaccctggagcacagtccgaggtgggcaaaggcagctcgaggccgtggtcagcaacctcttgctcagtgctgtgcccatacacgtctgtcagcagggccctggttctagtgtttgccgacttccacggtgcacatgcactcaccgtggctgatttccagctgcccatgtgttgccactgactgtggaactggagagtcacagtgacacgtggtatttctacagtagatgtgaaaagcctggccgggcacggcggctcacgcctgtaatcccagcactttgggaggccaacgcgggtggatcacctgaggtcaggagttcgagaccagcctagtgaaaccccgtctctacaaaaaatacaaaaattagccgggcttggtggcatgcacctgtaatcccagctactagggaggctgaggcaggagaattgcttgaatccaggaggcggagcttgcagtgagccgtgccactgcattccagcctgggctacacagcaagactctgtctccaaaaaaaaaaaaaggaaagcctgatgcgtgcacaggctctagtgaaccaagtaaaataattaggaagggatgaggttttccatggttttgttcgttcattttgtttttttttgagacagggtctcactcccatcagccaggctcgagtgcagtggtgggatcttggctcactgcagccttgacttcccaagctcaggtgatcctcccacctcagcctcctgagtagctgggactacgggcacgtaccaccaagcccagttaatttttatatttttttgcagagatggggtcttgacatgttgcccaggctggtctggaactcctgggctcaagcgatcctcccaggcctcccagagtgtggggattacaggtgtgagccactgcaccaggccaggaagtgatgagttttcagagttttgagtattcattacctttattttaatataatttatttatttagtcataaatttatgtaatttttttttttttgagacagagtctagctctgtcacccaggctggagtgcagtggtgctatctcggctcaccgcaacctccgcctccccggttcaagcgattctcctgcctcaccctcctgagtagctgggaatacaggcgcccgccaccacacccggctaatttttgtatttttagtaaagatggggtttcactgtgttggccaggctgatctcaaactcctgacctcatatgatccacccacctcagcctcccaaagtgctgggactacaggtgtgagccaccattctcggcttataatttaattattattattattattattttttttttgagacagagtctcactttgtcaccaggctggagtgcaatgccgtgatctcagctcactgcaacctccacctcttggttcaagcgattctcctgcctcaacttcccaagcagctgagattacaggtgcccaccaccacgcccagctaattttttgtatttttagtaaagacagggtttcgccatgttggccaggctggtttcgaactcctgacctcaggtgatccacctcctcggcctcccaaagcactgggattacgggcgtgagccaccttgcccagcctataatttaatttttaataatgactcggttaggctgggcgcagtggctcatgcctgtaatcccatcattttgggaggctgaggcgggtggatcacaacgtcatgagtttgagaccagccgggccaacatggtgaaaccccatctctgcttaaaaaatacaaaaattagccgggcatggtggcgtgggcctgtaatcctagctactccgaaggctgaggcaggagaattgcttgaatccaggaggcgaagcttgcagtgagccaagatcacgccactgcactccagcctgggcgacaaagcaagacttcttctcaaacaaaacaaaaaacaaaacaaacaaacaaacaaaaaatgactgtgttaacgactggcttgcaaaatttctgaaaattcacaattggctccggaggatggggttgatccaactccaggctgacactgcccctggggtgagggcccccaggaattggagggcgggggctgaggggacggtcccttaaggccttatgcccacagtcgccttttcctcccccagatcctctccttcatcctgcacacaatcgtgcgaggattcatccactccgctgtcgggggcctgtacgctgccgtgtaagtcctggaagccgcaggtggcctggtgggcgagggtgtgggaatggccggggggaggttgctggtgggactgagactctgaggcagggtcagcctgtcccagaagggctcatcttcctgcttcaggggacaggtaccagggtttctgctgggtgtttcagggaaaggccatacctcgtgggaagcaggtcagtgggcagacagttgggtgctcacaagccttggcattcaacacgaagtcagttcccccagccagggtcaggcacctgtgcagctcattatggcctcaggggccactacagccgagtcctggggctggccctggctgctcactgggaaggatgggtaggttctggctgcctgaagctaaatgcggaagttccagttgccctcatcacgggcagcaacatgggtgactgagtccagaatacaccagacgggcccatccagagcctcagtgcgcccagctctggccatagctttctccagccctggctaaaatgaaacctgtatctttttccaagaagccccagaaacataaaaggaaccacagtggttccttcttctctggctcaggccttgacccaaaaactgaaactcaaacatcatcatccacagtctctgatgtgggaccagctcatgtgttgctgggattcctttcccacctctgggccagcagagcctgacatgtgctaagatttagcccggaactctctcccaattcccgcaacagcccctggggtaatcccagctccgcttgccctccgcctgcccctccccaggcctggaggaagctgtggctgtcctggcagggtctgagggaggggggcgggatctgtggtgctgagtttccgcgattactcaatgcttctctggacgagggcactgcagagccaagcccagcctccacactcctctctgggcctgtttcccaaaccgcaggtccccgctggcaccacgctttccactcggctcagccagacacccacaggccctgggcacagctgagtggggtgggccctccccagagtctggggcctggagctggtccaaagagaaacactttgcagaaccacccagcagggccgggcgcggtggctcacgcctgtaatcccagaactttgggaggccgaggcaggcagatcacgaggtcaggagtttgagaccagcctggccaacgtagtgaaaccccgtctctactaaaaatacaaaaaattagccagatgtggtggcgggcgcctgtaatcccagctactagggaggctgaggcaggagaattgtttggactggggaggcggaggttgcagtgagccgagatcgtgtcattgcactccagcccaggcgacagtgcaagactccatcttaaaaaaaaaaaaaaaaaaacagaactgcccagcaggaaggaatccgagggctggcaccccacccttctctggcaccaacggtgcagcccggggtcaccagacacctggggccaagcaaagcccaggaggcaggatggctgtgagctgtcgcttgccctgcaggtacccctccacccagttcggcagcctcacgggactgcagtctctgatcagcgcgctcttcgcccttctgcagcagccgctgtttctggccatgatgggtcctctccagggagaccctctgtgggtaagaggggtcgggggatggtgggtcatgggcgcctgcccccttctgctaactgcgagctgcaaggtccccctcgggggcttcagggccccgaggacatgtgggagcgttggttaggattggttaagagtccctttgtgaatggtggctaggcaggaaaaggaacatgtcctctctggacctgatttggggagaaatagaacagagttcctgggccgggcgcggtggctcacacctgtaatcccagcactttgagaggccgaggcgggagcatcacttgaggtcaggagttcaagaccagcctggccaacatggtgaaaccaggtctctactaaaaatacaaaaattagccaggtgtggtggcaggtgcctgtaatcccagatactcgggaggctgagacaggagaatcacttgaacccgggaggcggagattgcagtgagctgagattgcgccactgcactccagcctgaatgacgacagcgcgagacttcgtctcaaaaaaaaaaaaaaaaaaaaaagaacacagttcctgtccccgccccacctccgagggccagatttcctcaccaggtaccaggaacttgttccaagcccagaggttcagatcagcccgtgtttcctgggggcccaggccctgagggtggccacatggcctgtgaagagttgggaaccgggacgctggcatatgggacctcgtgggccttcctgtttcgttcccccctccaccccgtgaccttctcccctttcccaaacccgagtggagggcgggtctgcagcctcggcgcaccaccacgccctgtgatgcgcggcctccctgcctccccaggtgaacgtggggctgctccttctcagcctgctgggcttctgcctcccgctctacctgatctgctaccggcgccagctggagcggcagctgcagcagaggcaggaggatgacaaactcttcctcaaaatcaacggctcgtccaaccaggaggccttcgtgtagtggctgccgcctcggaactgcggtctcctgcctgtgcttcagtgactgacccctgtcctgcccctccagagtaccccacgcacccccaggaccttcgccgtctccgtgccagcgttcacgctccctcccggggccctgcctcggagctctgtggtggaaggacgggagagggccccggacacgcgcgttttctcctgccgaacgcaggggctgccctgactttgctctgccgccccccggggacccggggcctggggtctctgtggtgcctgcagcaggagccaggaacgcccggcaggcaggcgctctcccgccagtgtctggattctgcctcttgccaaagcagagggggctgccatcccctgcctgccacctgcccctcggctgcatgcccacagccgtacctgcctgaggacaaaggcttgcactgtctcgcccgcgcctggcccccaccccctccccggccagcctgaggctgcctgaggaaggaaggacccgcttcctgttgtcggtgctaattcctttgtaattccagccccctgtcgcctgtccagggcctgcccacccgttggaggccggtggagaagccccacctggcttatgccctggagagggtttagcgggctgggtggacccctcgcctcctccccgagggccaatgccgcggacacgttttcactgtcaccctcgttctgtctgccacctgaagggaatttgaggaccgccgccagggcaccccgtacatacacacagctgcttttgtggaggtggacgaaaggctgtggccggcagacgtggaggtccaggccggggtggggacgtgggtgggtccgaggggtgtgtggggtcggggtgggctctaggagttagcccttatccccactgaccaggcgggagccgccaggcctgcagctgggccagtgcccaggagccatcctggcgtggggccaggagcttgtccaaggccacaggcccacagcaccccctgccggcgggctccgtggggccctggagctgatgacgggggaggcccgtccgcctggcccaccaacccgcccaccttgactgcccccagaagtgtgtcttgagacctcctgggcgtgcttagaggggtgagttgtgtttggatttttagttattttctcttcagttttattagacttcttttttataaagcaataaatccattttcctccgggtaagggatgccccttctggcatatcagttaatagctgcatgtgcctattttgagcttgagaagaaaaggcaggacaagactctctgccaccgaccagctccagccgtgcccagctgctcttcgtctctctgggggactgctgactcgggagggacagtgggccaggaaaagaccttcctccccaacccccaaacaaactgggcttgtgcagacatcttagaagtgtgagccaccctcctctaccgattttcccagccaaacaggcgaatcctggtccctttccatccctacacccttccacaaccctgaagattcccgctgggttcttctgcaggctcagagcagttcaggatgtgggcggcagggagggggatgaaaggagaagaggaaagggcaggtccaggccacattcaagctccacattaacagcttgggcgcctggaacacatatctcctaggctttatttcactcaaatatttaaaaaaagactgggcgtggtggctcacgcctataatcccagcactttgggaggccaaggcaggaggctcacctgaggtcaggagttcgagaccatcctgaccaacatggagaaaccccgtctgtactaaaaataaacattaatcgggcgtggtggcgtgcgcctgtaatcccagctactcgggagcctgaggcaggagaatcgcttgaaccggggagacggagattgccgtgagtcgagatcgcaccattgcactccagcctgggcaacagagcgaggctccgtctcaaaaagaaaaaaaaaaagagaacgagataaacatgcccactcctgagaacactcgttttgtgatgttagtggttattctgattttcaagaaagtattatagtcaagtttgggaaaggctgagttaaaagtcaagcctgtttccttacagccagcactgacagcactttgccaacgctcatgagctccgtggctcctcaggagcgggtgtgctgtgctgccgaggaacggctcgaaccatcagagccaccagcctccacgtgcggctccatgatcacccccagcagaggctcccgggtgctggttccaaatggagactccaggtcttgccgctgaccggtgactctgctgccagcatttgagacccgccatcacacaggagttgcagattcggagaaaccctaactagccagggtgctgccagctgggaaaaggccgcctttttttttttttttttttttttgagttggggtcttgctctgccatccaggctggagtgcagtggtgcaactgatagctcaccacggcctccaactcatgggctcaagggatcctcccacctcggcctcctaagtatctgggactataagtgtgtgccaccatgcctggctaattttttttttctttttcataaagatgaattcttgctattttgcccaggctggtctggaactcctgggctgaagcaattctcccacctcagcctcccaaagtgctgagattacaggcgtgagtcacaatgcctagccaaaaagccagtcttgagatggggaagacgtggcccgtgctgtccccagcagtgcccagtcccagccaaagtgggcagtgctgcctcactctcccacccaccctcagggtgtggcacttactgggaagaagcaggcattgagaaacagaattgagggggggaaacagtccagggccaacagtgcttggggattgaggcctgaaaatgcgagcagggtacagaggctgtggctggccagatgggtcgggtgccccctgcactcccaccccctagtcaggggtcacccatcctactttgccttgtgtggagctgacaggtgacatgttttcctattgttgtccttgacttgataacaatctgggagttaaacacatatgatcatccctgctttacaactgaaaaacgaggcctagagatactatcatcatatacacctgaaaaacgaggcctggagcgatggaggagcttgttcaaggtcagagccagcactcatatatgggtcttaagacactggagcagccaagggcctctagaccaggacattccactcggagcagcagctcaggggccaccaggcctctgtggcagggggacctctgtggcaggggggacctctgtggcgggggggggcctctgtggcaggggggtcacagcccaaggaaggggagcaggcccaggcatggtttccgtttctgggagccaagagccttctcagaagagggggagagagctactgcatggaatcatttgggccctggaggctgatgggtacttgggggagcaatccctggtgaccccaaccagcaagacaagtgccctgtgaaggggaagggactacagctgatcaaaggagcaggcaccagtggccgggcctcccgtctgcccctcatcctccaggctctggcgggaaggagcaggaagggctccctgcccttggggttttgatcagtgaggaggggggcttgggtctgagtctgggtctgggtctgctgccgaaacactgcccccagtccctctcctcactagactctggggtctaggcgtgtctttgtggtcggccttctccaaaccctctaggcctctgtctgcagctgctgctgcctggacctatacacaaggtcccacccctcaccggggccaaagacgtggtttcaggccctggtggatcctttctgttttgctccatccccgtcccctcttgcacccagcatcgtcctggtcagaacttccgtttaaaccttccttgcctgccgtgcactccgaggggggcgtcactttgccataggccccagggctgaaaatggcgggacatccagtattgggctcacgtgcataagactgtcccagacagcagcacaatcacgttcagccaagtggagtttccgacgcacttgtgtggcagccgcgtgaatgtgagccgatatgcagctgggaggggttgtgggcctcctgcggtgaggggctcctgccaggagctctgagaagcctccacagaatcagccgtcgggctccttcagcagcagctccccttatctgtgccaacgactgggggcctaactcaagggtgccagcccgtcttccgccaatacagactgtgggattctgagagttaggagcctggggtcccctggggtggggtggtcagggtgagcaggtgggctctgtgagcctgtttccccatgccctgactcaccccaatccctgggtgaggacagagctcctgaaggccactgaaggaggtgcagcacactccacctgggtggccttccgcagctcagccctcttcctgccagcaggaagcctctgcctgtgctccttaagttagccatcctcaccccctccgggcagctctgagactgagccagggccactagcagcacccagacctcgacccttctcagaccgaggcgccaccaccccaggccgaggaggcaaggagggaagaccaaagtctagaggactgtcttggtggccctgggcgagtcttgaactttggtgccatcatctgcaaaagggaggaaagaatgcctgcgtggtgcagctacgtggatacgcagtgaagacccgcatggtgggacgcctggcacttaacaatggtagcatttggccgggcgcggtggctcacgcctgtaatcccagcactttgggaggccgaggcgggcggatcacgaggtcaggagatcaagaccatcccggctaaaacggtgaaaccccgtctctactaaaaatacaaaaaattagccgggcgtagtggcgggcgcctgtagtcccagctacttgggaggctgaggcaggagaatggtgtgaacccgggaggcggagcttgcagtgagccgagatcccgccactgcactccagcctgggcgacagagcgagactccgtctcaaaaaaaaaaaaaaaaacaatggtagcatcgttttcagtgcccaggaagaaggcagctgggacagggaaagggccaccacaccacacccaagcccatacaacaggagagccactttcagcagctctgagcaggacagacttgtggccaagtcaagaaagtaaggtctggtcccagcgaggtggctcatccctgtaatcccagtgctttgggaggccgaagcgggggcggggtggatcacttgaggtcaggggtttgagaccagcctgaccaacatggtgaaacctcaactctactaaaaatacaaaaattagggccgggcgcagtggctcacgcctgtaatcccagcactttgggaggctgaggcgggcggatcacaaggtcaggagatcgagaccaacgtggctaacacagtgaaaccccatctctactaaaaatacgaaaaaaaaaaattagctgggcgtggtggtgggtacctgtagtcccagctacttgggaggctgaggcaggagaatggcatgaacccgggaggtgaagcttgcagtgagccgagattgtgccactgcactccagcctgggcgacagagcaagactccgtctcaaaaaaaaaaaaaaaaaaaaaaaaagtaaggtctgtatctgctgaccccacccttctccgaagccctctccgagcaaagccttaagaaactcttctctcgttcacttttcttttgtggctttcacgttttggtaagacttggccaaatagctgctcgagataatcaatcactggtggacaagtttctgctgagtgaggtttctgctgagtggggcgactcaaggcacggtcacgtaggcagcacctgtacaccgcatcctcatacagctgcgggaccgtgcctctgactgtgtgcgtgtgtgtttatctaagtgtgagatgcatccgggcatgtcagggtgtgtacatgttgggaagactgtgtagatttcttgtgtgccgctctctgaatggaggagaggggaagcgtcttacctcgctgaatccctttccattgctggaaagaacacctgggcaggagcggccccaagaccccgcccaggccctcggaagggagcctgaagggttaatccgtaccctgtattaaccagggtcaacccagcggctgacccgcctcttccctgctcctttgccgtttctagcacctggcttacttcctggcacacagtgagcactcaataaatgtatgctgagaatgactgcgagcggcttcctccttggctcctgtgtctctttctccctagatcacacatttctcgcctcttgtctggtgcccaggttccctgtcccttgactgggatgcgttcctgacccccacccctgccaggctgcatttgctggttgatctgcattgccatttgaaggagtgtgggagggcagagcaacaggccttttgggtgggaagaccaaggctgctggtgaattctgcttataaaggaagccccctcggatcacctgaagtcaggagttcgagactagcctgaccaacatggtgaaaccctgtctcttctaaaaatacaaaaagtagccaggcgtggtggcgagcatttccagcactttgggaggccgaggcgggcagatcacgaggtcaggagatcgagaccatcctggctaacatggtgaaaccctgtctctactaaaactacaaaaaatgtccaggtgcggtggctcacgcctgtaatcccagcactttggaaggccgaggcgggcagatcacgagctcaggagatcaagacaatcctggctaacacggtgaaaccccgtctctactaaaaatacaaaaaagtagccgggcgtggtgacgggtgcctgtactcccagctactcgggaggctgaggcaggagaatggcgtgaacccgggaggcggagcttgcagtgagcggagattataccactgcgctccagcctgggcaacagagcgagactccgtctcaaaaaaaaaaaaagaaaagaaagaaaaaaacattctttgaaggctggcgcatgctctgccttggtccccactctacccccagtgcctagaatcgtgcctggcatggaatagctgctcaataaatatttgggggacgaagtttaaaaagagagagagacagaaataccacagaaaagaagctaaaatagactaagaggctgggagaagagcagagcggaagatggaaacagtgaaatacagtctccccaggacacccagagatgggttacagggctggctataaccgacgcagtaccaagggtcaaccacccaggggaaaccatgctgagaactggaaccgtgagatccacagacacaatgatgaaagagtggccgggtgccgtggctcatgcctgtaatcctggcactttgggaggctgaggcaggtggatcgctggagcctaggagttggagaccagcctggccaacatggtgaaaccccatctttactaaaagggcaaaaaattatccgggcgtggtggcgggcacctgtaatcccagttactcgggaggctgaggcaagagaattgcttgaacctggaaggcagagtttgcagtgggctgagatggcaccattgcactccagcccgggcaacaagagtgaaactccatctcaaaaaaaaaaaaagaaaaaacaaaacaaaacaaaaagacgaaggagtgagagagagaaatagactgtgatagaacacagcagacacaggggaaaggagatagccgcaaagagacgatgaaacatggggtcttgtggttcacatctataatcccagcaattcgggaggcccagccaggaggatcgtttgagcccaggagtttgaaaccagcctgggcaacataatgagagcttgtctcttaaaaaaaaaaaaaaaaaaaaattggccaggcgcagtggctcacgcctgtaatcccagcactttgggaggctgaggcgagcagatcacgaggtcaggagatcgagaccatcctggctaacatggtgaaaccccgtctctactaaaaatacaaaaattagccgggcgtggtggcgggctcctgtaatcccagctactcgggaggctgaagcaggagaatcgcttgagccccgagagatggagcttgcagtgagccgagatcatgccactgcactccagcctgggcgacagagcaacactctgtctcaaaaaagagaagaaaaacaaaacaagggctgggcgcggtggcttacacctgtaatcccagcactttgggaggccgaggcaggcggatcacgaggtcaggagatcgagaccatcctggccaacacggtgaaatcccgtctctactaaaaatgcaaaaattagccaggcgtggtggcatgcgcctgtaatcccagctactcgggtggctgaggcaggagaatagcttgaacaagggagtcggagcttgcagtgagccgagatcgccactgcactcgagcctggtgacacagcaagattctgtctcaaaaaataataataaaaaaaaaaaaaaaaacaaagactgagaccacaggaagtgggagagaggggaagggaaaggcccaaagaggagagacaggaagcgaggtaaaggtgaggcagaaatgcagagagcccagagaagtgagacgacagtcataaagggagacagagatgtgaagggagggacagagaacagagagagaatgagacagggtgacagaggtccagagagagacagcctgggagagccagagagacacaagtgagagacagagagatacgaaagggacaggagaaacaggaagagagagggagcttgagaaactgagagaggacggacagagggagcaaggcaaagagagagagatccatggaaagctgctcgtttctttcctctgttaagcctggagcatgcagaaatgcagaagtaggttttttgttttgttttgtttttgatacagagtcttgctctatctcggctcactgcaacctctgcctcacaggttcaaatgattcttctgcctcagcctcccgaggagctgggactactggcgcacacctccacgcctggctaatttgtgtatttttagtagaaacggggtttcaccatgttggccaggctggtctcgaactcctgatctcaggtgatccacacacctcggcctcccaaagtgctgggattacaggtgtgcggcaccgtgaccagcctagaggtagttttgaggggcaggggtgtccatccctccttgttcacaacgcccttttcccaataattaataataataataataataataataataaggaaatatgccactcactgcagaaagctgcttcatgtccattgcctcatccaaggaggctcagcagccccatgacgcaggtaccggcatgttccctatttcccaagtgaagaaactgagatacagagaggttaagtcacttgcacaaggtcacagaggtaggaagtggaggcctgggactccaaggcagcggaagtctgtgtcctgggtggggctgttggctcacagtgtggcacagctggagagtggtgtgacccctgcgtctaacccgtatggacatctgcagcaaacttgctattgaaaaagatgtaaaaaacgtaactcaaaataaagtgtgaaaaaaaaaaatacatggaccttgcctggatactgaacttctctaaaggaaactatagcattttttagattagcagggaaattagaatatgaactggggatgagatagcatcaggaaatcattattaattttgttaagtatgacaatggcattatgcatttgtaagaaatgtgcatatttctagaatgtgcactgtaacctggaggggtgagatgacatgatgtccaaggtcggcttgtttttttttattttaatttaaatttaattttattttcttattatacttaagttctagggtacatgtgcacaacgtgcaggcttgttacatatgtatacatgtgccatgttggtgtgctgcacccattaactagtcatttacattaggaatatctcctaatgctatccctccccctccccccgtcccacaacaggccccagagtgtgatgttccccttcctgtgtctaagtattctcattgttcaattcccacctatgaatgagaacatgcagtgtttggttttctgtccttgctatagtttgctgagaatgatggtttccagcttcatccatgtccttacaaaggatattaactcatccttttttatggctgcatagtattccatggtgtatatgtgccacattatctgagacttttttttttttgagacagagtctaactctcgccaggctggagcgcagtgacacgatcttggctcgctgcaacctctgcctcctgaattcaagtgatcctcctgcattcaagtgatcctcctgcctcagcctcccgagtagctgggactacaggcgcgtgccaccacacccagctaatttttgtatttttagtagagacagggtttcaccatttcagccaggatggtcttgatctcttgacctgatgatccgcccgcctcagcctcccaaagtggtaggattataggagtgagccaccgcgcccggctgtgccacattttctttatccagtctgtcattgatgggcatttgggttggttccaagtctttgctattgtgaatagtggtcggcttgtttttttgagacagaatcttgctctgtcgcccaggctggagtgcggtggcatgatctcggctcactgcaacctctgcctccagggctcaagcgattctcctacctcagcctcccgagtaactgagacgacaggcacatgccaccacactgagctaatttttgttttagtagagatggggttttaccatgttggccaggctggtcttgaactcctggcctcaagtgattcgcccgccccagcctcccaaagtgctgggaatccaggtgtgaggcactcagcctggcccccactctaggatctgataagtgagcacagtgctcagggcagtcgcgggccgccagtcacatcctgatagcaacacggccagctgctccaccctcccttcccaagtccctgtcttaggcagcccactcccatctcccctggatgcccctctagcgtcctgcgctgagtgtgagtccagcactggagtcattacctgcccccatgccagcctgtcttgcctgtgttctcagagaagacagtaccgtccaccccggctcccaggccagagacctcgctgcttttctctcctcctctcagccaatgagtcaacaagtctcacggagtttaccttctgagttgctcctgaatccatcccttccttttcttccctcccactgtcctagtccacctgcacctggacatctgcagcagcctcctcgccggtctccctgcctacgctctggcattcc

SEQ ID NO: 3445 - DNA, 3532 bp, Homo sapiens
gggtctcgggcgcgggcgggagggcacctgtcagggtccctgggagaggcagccctcggatctgcccctgcccacctcacgctgcgttccatgctggccccaggcgatgtcagtcctgctgcaggccaggactagttccacggccctgagcatgcgttagccccttcttgcctccatgcctcagtttacctcggagtgagctgcgggagacgtctccctgcctggccggggcggctctgtcgtagcggagggcagcggtacgagccggccgcgggctcggggtgtcccaggtggtgcagagccggagccggagccggagccgcgccgcgccgcaccatggcgcccaccctggccactgcccatcggcgccgctggtggatggcctgcacggccgtgctggagaacctcctcttctcggcagtcctcctgggctggggctcgctgctcatcatgctcaagtcagagggcttttactcctacctgtgtaccgagccagagaatgtcaccaatggcacagtgggcggcacagcagagccggggcacgaggaggtgagctggatgaacggctggctcagctgccaggcccaggacgagatgctaaatttggccttcactgtgggctcctttctgctcagtgccatcaccctgcccctgggtatcgtcatggacaagtatggcccgaggaagctcaggctgctgggcagcgcctgcttcgcggtttcctgcttgctgattgcgtacggagcaagtaaaccaaacgctctctccgtgctcatcttcatcgccctggctctgaatggctttggtgggatgtgtatgaccttcacctcattaacactgcccaacatgttcggcgaccttcggtccacgtttattgccttgatgattgggtcctacgcctcctcggcagtcacctttccaggaatcaagctcatctatgatgctggtgtctccttcatcgtcgtcctcgtggtctgggccggctgctccgggctggttttcctcaactgcttctttaactggccccttgagcccttcccggggccggaggacatggactactcggtgaagatcaagttcagctggctgggctttgaccacaagatcacagggaagcagttctacaagcaggtgaccacggtgggccggcgcctgagtgtgggcagctccatgaggagtgccaaggagcaggtggcgctgcaggagggccacaagctgtgcctgtccaccgtcgacctggaggtgaagtgccagccggatgctgcagtggccccctccttcatgcacagcgtgttcagccccatcctgctgctcagcctggtcaccatgtgcgtcacgcagctgcggctcatcttctacatgggggctatgaacaacatcctcaagttcctggtcagcggcgaccagaagacagttggcctctacacctccatcttcggcgtgctccagctgctgtgcctgctgacggcccccgtcattggctacatcatggactggaggctgaaggagtgtgaagacgcctccgaggagcccgaggagaaagacgccaaccaaggcgagaagaaaaagaagaagcgggaccggcagatccagaagatcactaatgccatgcgggccttcgccttcaccaacctgctgctcgtgggctttggggtgacctgcctcattcccaacctgcctctccagatcctctccttcatcctgcacacaatcgtgcgaggattcatccactccgctgtcgggggcctgtacgctgccgtgtacccctccacccagttcggcagcctcacgggactgcagtctctgatcagcgcgctcttcgcccttctgcagcagccgctgtttctggccatgatgggtcctctccagggagaccctctgtgggtgaacgtggggctgctccttctcagcctgctgggcttctgcctcccgctctacctgatctgctaccggcgccagctggagcggcagctgcagcagaggcaggaggatgacaaactcttcctcaaaatcaacggctcgtccaaccaggaggccttcgtgtagtggctgccgcctcggaactgcggtctcctgcctgtgcttcagtgactgacccctgtcctgcccctccagagtaccccacgcacccccaggaccttcgccgtctccgtgccagcgttcacgctccctcccggggccctgcctcggagctctgtggtggaaggacgggagagggccccggacacgcgcgttttctcctgccgaacgcaggggctgccctgactttgctctgccgccccccggggacccggggcctggggtctctgtggtgcctgcagcaggagccaggaacgcccggcaggcaggcgctctcccgccagtgtctggattctgcctcttgccaaagcagagggggctgccatcccctgcctgccacctgcccctcggctgcatgcccacagccgtacctgcctgaggacaaaggcttgcactgtctcgcccgcgcctggcccccaccccctccccggccagcctgaggctgcctgaggaaggaaggacccgcttcctgttgtcggtgctaattcctttgtaattccagccccctgtcgcctgtccagggcctgcccacccgttggaggccggtggagaagccccacctggcttatgccctggagagggtttagcgggctgggtggacccctcgcctcctccccgagggccaatgccgcggacacgttttcactgtcaccctcgttctgtctgccacctgaagggaatttgaggaccgccgccagggcaccccgtacatacacacagctgcttttgtggaggtggacgaaaggctgtggccggcagacgtggaggtccaggccggggtggggacgtgggtgggtccgaggggtgtgtggggtcggggtgggctctaggagttagcccttatccccactgaccaggcgggagccgccaggcctgcagctgggccagtgcccaggagccatcctggcgtggggccaggagcttgtccaaggccacaggcccacagcaccccctgccggcgggctccgtggggccctggagctgatgacgggggaggcccgtccgcctggcccaccaacccgcccaccttgactgcccccagaagtgtgtcttgagacctcctgggcgtgcttagaggggtgagttgtgtttggatttttagttattttctcttcagttttattagacttcttttttataaagcaataaatccattttcctccgggtaagggatgccccttctggcatatcagttaatagctgcatgtgcctattttgagcttgagaagaaaaggcaggacaagactctctgccaccgaccagctccagccgtgcccagctgctcttcgtctctctgggggactgctgactcgggagggacagtgggccaggaaaagaccttcctccccaacccccaaacaaactgggcttgtgcagacatcttagaagtgtgagccaccctcctctaccgattttcccagccaaacaggcgaatcctggtccctttccatcc

SEQ ID NO: 3446 - protein, 561 aa, Homo sapiens
MAPTLATAHRRRWWMACTAVLENLLFSAVLLGWGSLLIMLKSEGFYSYLCTEPENVTNGTVGGTAEPGHEEVSWMNGWLSCQAQDEMLNLAFTVGSFLLSAITLPLGIVMDKYGPRKLRLLGSACFAVSCLLIAYGASKPNALSVLIFIALNGFGGMCMTFTSLTLPNMFGDLRSTFIALMIGSYASSAVTFPGIKLIYDAGVSFIVVLVVWAGCSGLVFLNCFFNWPLEPFPGPEDMDYSVKIKFSWLGFDHKITGKQFYKQVTTVGRRLSVGSSMRSAKEQVQEGHKLCLSTVDLEVKCQPDAAVAPSFMHSVFSPILLLSLVTMCVTQLRLIFYMGAMNNILKFLVSGDQKTVGTSIFGVLQLLCLLTAPVIGYIMDWRLKECEDASEEPEEKDANQGEKKKKKRDRQIQKITNAMRAFAFTNLLLVGFGVTCLIPNLPLQILSFILHTIVRGFIHSAVGGAAVYPSTQFGSLTGLQSLISALFALLQQPLFLAMMGPLQGDPLWVNVGLLLLSLLGFCLPLYLICYRRQLERQLQQRQEDDKLFLKINGSSNQEAFV

SEQ ID NO: 3447 - DNA, 2031 bp, Homo sapiens
cgccatgctgcccaggctggtctcaaactcctgtccccaagtggccctccgaccttagcctcccaaaccgctgggattccagacgtggacaccgcgcggcagccctggggtgctaagccagccccccggagcgagccagggtgaccaaggcgattctggggcagtcagagggtcttcccgggtcgggttagtgcctcgaatccgggggacgaagacggggagctgagctttcggagcccgggcttatcagacggggacccggagccccctcgaaccctccctagcttgtaccagctggcggacgtggcccgtagcatcgccctgcagaggggaccttccctgaaagggacggggaacggggtgaaggtggccagcgcgggcagggagcacccagatgacgatcaagggtggagggtccccggaggaccgagcagtgcgtgaacacgggcggagaaaggtggtgcagagccggagccggagccggagccgcgccgcgccgcaccatggcgcccaccctggccactgcccatcggcgccgctggtggatggcctgcacggccgtgctggagaacctcctcttctcggcagtcctcctgggctggggctcgctgctcatcatgctcaagtcagagggcttttactcctacctgtgtaccgagccagagaatgtcaccaatggcacagtgggcggcacagcagagccggggcacgaggaggtgagctggatgaacggctggctcagctgccaggcccaggacgagatgctaaatttggccttcactgtgggctcctttctgctcagtgccatcaccctgcccctgggtatcgtcatggacaagtatggcccgaggaagctcaggctgctgggcagcgcctgcttcgcggtttcctgcttgctgattgcgtacggagcaagtaaaccaaacgctctctccgtgctcatcttcatcgccctggctctgaatggctttggtgggatgtgtatgaccttcacctcattaacactgcccaacatgttcggcgaccttcggtccacgtttattgccttgatgattgggtcctacgcctcctcggcagtcacctttccaggaatcaagctcatctatgatgctggtgtctccttcatcgtcgtcctcgtggtctgggccggctgctccgggctggttttcctcaactgcttctttaactggccccttgagcccttcccggggccggaggacatggactactcggtgaagatcaagttcagctggctgggctttgaccacaagatcacagggaagcagttctacaagcaggtgaccacggtgggccggcgcctgagtgtgggcagctccatgaggagtgccaaggagcaggtggcgctgcaggagggccacaagctgtgcctgtccaccgtcgacctggaggtgaagtgccagccggatgctgcagtggccccctccttcatgcacagcgtgttcagccccatcctgctgctcagcctggtcaccatgtgcgtcacgcagctgcggctcatcttctacatgggggctatgaacaacatcctcaagttcctggtcagcggcgaccagaagacagttggcctctacacctccatcttcggcgtgctccagctgctgtgcctgctgacggcccccgtcattggctacatcatggactggaggctgaaggagtgtgaagacgcctccgaggagcccgaggagaaagacgccaaccagtgcgtaggcagggccggtgccccggctcccagcccgcagcccctgcagaaagaccccagagctgcatgtcaggcacagggtgggtgggacagagggagagagcaatgcactccagctcctcccggagcccttagagagactcactcattcagctcagcatgcgtttcaactgctcccctctttatggaaattgtttggaatgcaatggaaatgctaaagtttgaggccaggtgcggtgactcatgcctgtaatcccagcactttgaaaggctggggtaggaagatcacttgaggccaggagttggagacc

SEQ ID NO: 3448 - protein, 483 aa, Homo sapiens
MAPTLATAHRRRWWMACTAVLENLLFSAVLLGWGSLLIMLKSEGFYSYLCTEPENVTNGTVGGTAEPGHEEVSWMNGWLSCQAQDEMLNLAFTVGSFLLSAITLPLGIVMDKYGPRKLRLLGSACFAVSCLLIAYGASKPNALSVLIFIALNGFGGMCMTFTSLTLPNMFGDLRSTFIALMIGSYASSAVTFPGIKLIYDAGVSFIVVLVVWAGCSGLVFLNCFFNWPLEPFPGPEDMDYSVKIKFSWLGFDHKITGKQFYKQVTTVGRRLSVGSSMRSAKEQVQEGHKLCLSTVDLEVKCQPDAAVAPSFMHSVFSPILLLSLVTMCVTQLRLIFYMGAMNNILKFLVSGDQKTVGTSIFGVLQLLCLLTAPVIGYIMDWRLKECEDASEEPEEKDANQCVGRAGAPAPSPQPLQKDPRAACQAQGGWDRGREQCTPAPPGALRETHSFSSACVSTAPLFMEIVWNAMEMLKFEARCGDSCL

SEQ ID NO: 3449 - DNA, 2022 bp, Homo sapiens
gggtctcgggcgcgggcgggagggcacctgtcagggtccctgggagaggcagccctcggatctgcccctgcccacctcacgctgcgttccatgctggccccaggcgatgtcagtcctgctgcaggccaggactagttccacggccctgagcatgcgttagccccttcttgcctccatgcctcagtttacctcggagtgagctgcgggagacgtctccctgcctggccggggcggctctgtcgtagcggagggcagcggtacgagccggccgcgggctcggggtgtcccaggtggtgcagagccggagccggagccggagccgcgccgcgccgcaccatggcgcccaccctggccactgcccatcggcgccgctggtggatggcctgcacggccgtgctggagaacctcctcttctcggcagtcctcctgggctggggctcgctgctcatcatgctcaagtcagagggcttttactcctacctgtgtaccgagccaggtgagacaagcgcctggggttgcgggggggctcctggagctggggctttgggagggggcgggatgggggcgaagacctagcgagccacagcaccgcattgcccagtgcctctagggtatcagaaggcccatctgatcctcacccagccctgccgggtacttgtcattgcccctgttttgtggacgaagacatcgaggctcagagcgatctgtcttgcgcaaggccgcagagcctgggcctgccatccacccagaaccccacctgctgtccagggtgttccttccacccgctacgaacattgctggactgctctcctctcctcccagccctggaacatagcttggctggtagtaaacatgttgctgtctgcttgtgagaaagaggaactccagattaaggggctggggtgcagcaggagaggaagtggccttgcctccaccccagggagggctcatctagaatctagacgttcctcaggccattgtggagtctcctaagtgcttgctggacacaatttcttgtctatttttgctgccttatgattctccaaaggacatttcccccacgggctctgaggacatctccgtggctttccaaccccatggggatgaaggggaagagaagaaaggaacgtttatggaaatgatgctagggttgttctctcctctttgccttgtcactggaattgctgaaggcaggctgaggatgcttctctacatgacatctgcaccacccaacacacacttaccttcacaccttcataccctgttggagggtcctgatgactacagggcagtaaattcagccccacaggagggccacagcagcccccagcctctagcctcctaccctccttcttaggcaaccttgacaggaaattttccctctgccttctccttgatcccaacggtagctgcataatagctgagctcacataatccctgtcgccagtgctagagtgcccttagatggaggtagcccaggtttgacttcctgaatccccagcagcaggccttttctttctagagctctttgcaggaagagaaagctttggaccagctcatgctgggtgtaatcctttgtggaagcctccctgtttcccttctctgatctgccccggagattcctgtgtgtcccagtctctagggagggaggcttagctggagaggttcagggcaggagaaagcaggagaatgcagaggccgcggggagaggacagaaagtatatcatttataactaacctttagcctttagccactcaaaaatatttcctaatagcctaagggttcttggcaggtctttccccacatcagcaagaaatcttgggagttgggaagagtcagaccttgttccctgaacaagctttctgctttggccaagagttgttaggagattaatgcctgtccccgaaaggcacaggttggagtgtttacttcttcctctcctttcctctctccccccttagagatcgtgacccttcctgcttgcctccctggtgggctctttcaggctggacacagggttt

SEQ ID NO: 3450 - protein, 79 aa, Homo sapiens
MAPTLATAHRRRWWMACTAVLENLLFSAVLLGWGSLLIMLKSEGFYSYLCTEPGETSAWGCGGAPGAGALGGGGMGAKT

SEQ ID NO: 3451 - DNA, 3300 bp, Homo sapiens
cgccatgctgcccaggctggtctcaaactcctgtccccaagtggccctccgaccttagcctcccaaaccgctgggattccagacgtggacaccgcgcggcagccctggggtgctaagccagccccccggagcgagccagggtgaccaaggcgattctggggcagtcagagggtcttcccgggtcgggttagtgcctcgaatccgggggacgaagacggggagctgagctttcggagcccgggcttatcagacggggacccggagccccctcgaaccctccctagcttgtaccagctggcggacgtggcccgtagcatcgccctgcagaggggaccttccctgaaagggacggggaacggggtgaaggtggccagcgcgggcagggagcacccagatgacgatcaagggtggagggtccccggaggaccgagcagtgcgtgaacacgggcggagaaaggtggtgcagagccggagccggagccggagccgcgccgcgccgcaccatggcgcccaccctggccactgcccatcggcgccgctggtggatggcctgcacggccgtgctggagaacctcctcttctcggcagtcctcctgggctggggctcgctgctcatcatgctcaagtcagagggcttttactcctacctgtgtaccgagccagagaatgtcaccaatggcacagtgggcggcacagcagagccggggcacgaggaggtgagctggatgaacggctggctcagctgccaggcccaggacgagatgctaaatttggccttcactgtgggctcctttctgctcagtgccatcaccctgcccctgggtatcgtcatggacaagtatggcccgaggaagctcaggctgctgggcagcgcctgcttcgcggtttcctgcttgctgattgcgtacggagcaagtaaaccaaacgctctctccgtgctcatcttcatcgccctggctctgaatggctttggtgggatgtgtatgaccttcacctcattaacactgcccaacatgttcggcgaccttcggtccacgtttattgccttgatgattgggtcctacgcctcctcggcagtcacctttccaggaatcaagctcatctatgatgctggtgtctccttcatcgtcgtcctcgtggtctgggccggctgctccgggctggttttcctcaactgcttctttaactggccccttgagcccttcccggggccggaggacatggactactcggtgaagatcaagttcagctggctgggctttgaccacaagatcacagggaagcagttctacaagcaggtgaccacggtgggccggcgcctgagtgtgggcagctccatgaggagtgccaaggagcaggtggcgctgcaggagggccacaagctgtgcctgtccaccgtcgacctggaggtgaagtgccagccggatgctgcagtggccccctccttcatgcacagcgtgttcagccccatcctgctgctcagcctggtcaccatgtgcgtcacgcagctgcggctcatcttctacatgggggctatgaacaacatcctcaagttcctggtcagcggcgaccagaagacagttggcctctacacctccatcttcggcgtgctccagctgctgtgcctgctgacggcccccgtcattggctacatcatggactggaggctgaaggagtgtgaagacgcctccgaggagcccgaggagaaagacgccaaccaaggcgagaagaaaaagaagaagcgggaccggcagatccagaagatcactaatgccatgcgggccttcgccttcaccaacctgctgctcgtgggctttggggtgacctgcctcattcccaacctgcctctccagatcctctccttcatcctgcacacaatcgtgcgaggattcatccactccgctgtcgggggcctgtacgctgccgtgtacccctccacccagttcggcagcctcacgggactgcagtctctgatcagcgcgctcttcgcccttctgcagcagccgctgtttctggccatgatgggtcctctccagggagaccctctgtgggtgaacgtggggctgctccttctcagcctgctgggcttctgcctcccgctctacctgatctgctaccggcgccagctggagcggcagctgcagcagaggcaggaggatgacaaactcttcctcaaaatcaacggctcgtccaaccaggaggccttcgtgtagtggctgccgcctcggaactgcggtctcctgcctgtgcttcagtgactgacccctgtcctgcccctccagagtaccccacgcacccccaggaccttcgccgtctccgtgccagcgttcacgctccctcccggggccctgcctcggagctctgtggtggaaggacgggagagggccccggacacgcgcgttttctcctgccgaacgcaggggctgccctgactttgctctgccgccccccggggacccggggcctggggtctctgtggtgcctgcatgcccacagccgtacctgcctgaggacaaaggcttgcactgtctcgcccgcgcctggcccccaccccctccccggccagcctgaggctgcctgaggaaggaaggacccgcttcctgttgtcggtgctaattcctttgtaattccagccccctgtcgcctgtccagggcctgcccacccgttggaggccggtggagaagccccacctggcttatgccctggagagggtttagcgggctgggtggacccctcgcctcctccccgagggccaatgccgcggacacgttttcactgtcaccctcgttctgtctgccacctgaagggaatttgaggaccgccgccagggcaccccgtacatacacacagctgcttttgtggaggtggacgaaaggctgtggccggcagacgtggaggtccaggccggggtggggacgtgggtgggtccgaggggtgtgtggggtcggggtgggctctaggagttagcccttatccccactgaccaggcgggagccgccaggcctgcagctgggccagtgcccaggagccatcctggcgtggggccaggagcttgtccaaggccacaggcccacagcaccccctgccggcgggctccgtggggccctggagctgatgacgggggaggcccgtccgcctggcccaccaacccgcccaccttgactgcccccagaagtgtgtcttgagacctcctgggcgtgcttagaggggtgagttgtgtttggatttttagttattttctcttcagttttattagacttcttttttataaagcaataaatccattttcctccgggtaa

SEQ ID NO: 3452 - protein, 561 aa, Homo sapiens; identical to SEQ ID NO: 3446

SEQ ID NO: 3453 - DNA, 2786 bp, Homo sapiens
gggtctcgggcgcgggcgggagggcacctgtcagggtccctgggagaggcagccctcggatctgcccctgcccacctcacgctgcgttccatgctggccccaggcgatgtcagtcctgctgcaggccaggactagttccacggccctgagcatgcgttagccccttcttgcctccatgcctcagtttacctcggagtgagctgcgggagacgtctccctgcctggccggggcggctctgtcgtagcggagggcagcggtacgagccggccgcgggctcggggtgtcccaggtggtgcagagccggagccggagccggagccgcgccgcgccgcaccatggcgcccaccctggccactgcccatcggcgccgctggtggatggcctgcacggccgtgctggagaacctcctcttctcggcagtcctcctgggctggggctcgctgctcatcatgctcaagtcagagggcttttactcctacctgtgtaccgagccagcgcctgcttcgcggtttcctgcttgctgattgcgtacggagcaagtaaaccaaacgctctctccgtgctcatcttcatcgccctggctctgaatggctttggtgggatgtgtatgaccttcacctcattaacactgcccaacatgttcggcgaccttcggtccacgtttattgccttgatgattgggtcctacgcctcctcggcagtcacctttccaggaatcaagctcatctatgatgctggtgtctccttcatcgtcgtcctcgtggtctgggccggctgctccgggctggttttcctcaactgcttctttaactggccccttgagcccttcccggggccggaggacatggactactcggtgaagatcaagttcagctggctgggctttgaccacaagatcacagggaagcagttctacaagcaggtgaccacggtgggccggcgcctgagtgtgggcagctccatgaggagtgccaaggagcaggtggcgctgcaggagggccacaagctgtgcctgtccaccgtcgacctggaggtgaagtgccagccggatgctgcagtggccccctccttcatgcacagcgtgttcagccccatcctgctgctcagcctggtcaccatgtgcgtcacgcagctgcggctcatcttctacatgggggctatgaacaacatcctcaagttcctggtcagcggcgaccagaagacagaggcgagaagaaaaagaagaagcgggaccggcagatccagaagatcactaatgccatgcgggccttcgccttcaccaacctgctgctcgtgggctttggggtgacctgcctcattcccaacctgcctctccagatcctctccttcatcctgcacacaatcgtgcgaggattcatccactccgctgtcgggggcctgtacgctgccgtgtacccctccacccagttcggcagcctcacgggactgcagtctctgatcagcgcgctcttcgcccttctgcagcagccgctgtttctggccatgatgggtcctctccagggagaccctctgtgggtgaacgtggggctgctccttctcagcctgctgggcttctgcctcccgctctacctgatctgctaccggcgccagctggagcggcagctgcagcagaggcaggaggatgacaaactcttcctcaaaatcaacggctcgtccaaccaggaggccttcgtgtagtggctgccgcctcggaactgcggtctcctgcctgtgcttcagtgactgacccctgtcctgcccctccagagtaccccacgcacccccaggaccttcgccgtctccgtgccagcgttcacgctccctcccggggccctgcctcggagctctgtggtggaaggacgggagagggccccggacacgcgcgttttctcctgccgaacgcaggggctgccctgactttgctctgccgccccccggggacccggggcctggggtctctgtggtgcctgcatgcccacagccgtacctgcctgaggacaaaggcttgcactgtctcgcccgcgcctggcccccaccccctccccggccagcctgaggctgcctgaggaaggaaggacccgcttcctgttgtcggtgctaattcctttgtaattccagccccctgtcgcctgtccagggcctgcccacccgttggaggccggtggagaagccccacctggcttatgccctggagagggtttagcgggctgggtggacccctcgcctcctccccgagggccaatgccgcggacacgttttcactgtcaccctcgttctgtctgccacctgaagggaatttgaggaccgccgccagggcaccccgtacatacacacagctgcttttgtggaggtggacgaaaggctgtggccggcagacgtggaggtccaggccggggtggggacgtgggtgggtccgaggggtgtgtggggtcggggtgggctctaggagttagcccttatccccactgaccaggcgggagccgccaggcctgcagctgggccagtgcccaggagccatcctggcgtggggccaggagcttgtccaaggccacaggcccacagcaccccctgccggcgggctccgtggggccctggagctgatgacgggggaggcccgtccgcctggcccaccaacccgcccaccttgactgcccccagaagtgtgtcttgagacctcctgggcgtgcttagaggggtgagttgtgtttggatttttagttattttctcttcagttttattagacttcttttttataaagcaataaatccattttcctccgggtaa

SEQ ID NO: 3454 - protein, 233 aa, Homo sapiens
MCMTFTSLTLPNMFGDLRSTFIALMIGSYASSAVTFPGIKLIYDAGVSFIVVLVVWAGCSGLVFLNCFFNWPLEPFPGPEDMDYSVKIKFSWLGFDHKITGKQFYKQVTTVGRRLSVGSSMRSAKEQVQEGHKLCLSTVDLEVKCQPDAAVAPSFMHSVFSPILLLSLVTMCVTQLRLIFYMGAMNNILKFLVSGDQKTEARRKRRSGTGRSRRSLMPCGPSPSPTCCSWALG

SEQ ID NO: 3455 - DNA, 3699 bp, Homo sapiens
cgccatgctgcccaggctggtctcaaactcctgtccccaagtggccctccgaccttagcctcccaaaccgctgggattccagacgtggacaccgcgcggcagccctggggtgctaagccagccccccggagcgagccagggtgaccaaggcgattctggggcagtcagagggtcttcccgggtcgggttagtgcctcgaatccgggggacgaagacggggagctgagctttcggagcccgggcttatcagacggggacccggagccccctcgaaccctccctagcttgtaccagctggcggacgtggcccgtagcatcgccctgcagaggggaccttccctgaaagggacggggaacggggtgaaggtggccagcgcgggcagggagcacccagatgacgatcaagggtggagggtccccggaggaccgagcagtgcgtgaacacgggcggagaaaggtggtgcagagccggagccggagccggagccgcgccgcgccgcaccatggcgcccaccctggccactgcccatcggcgccgctggtggatggcctgcacggccgtgctggagaacctcctcttctcggcagtcctcctgggctggggctcgctgctcatcatgctcaagtcagagggcttttactcctacctgtgtaccgagccagagaatgtcaccaatggcacagtgggcggcacagcagagccggggcacgaggaggtgagctggatgaacggctggctcagctgccaggcccaggacgagatgctaaatttggccttcactgtgggctcctttctgctcagtgccatcaccctgcccctgggtatcgtcatggacaagtatggcccgaggaagctcaggctgctgggcagcgcctgcttcgcggtttcctgcttgctgattgcgtacggagcaagtaaaccaaacgctctctccgtgctcatcttcatcgccctggctctgaatggctttggtgggatgtgtatgaccttcacctcattaacactgcccaacatgttcggcgaccttcggtccacgtttattgccttgatgattgggtcctacgcctcctcggcagtcacctttccaggaatcaagctcatctatgatgctggtgtctccttcatcgtcgtcctcgtggtctgggccggctgctccgggctggttttcctcaactgcttctttaactggccccttgagcccttcccggggccggaggacatggactactcggtgaagatcaagttcagctggctgggctttgaccacaagatcacagggaagcagttctacaagcaggtgaccacggtgggccggcgcctgagtgtgggcagctccatgaggagtgccaaggagcaggtggcgctgcaggagggccacaagctgtgcctgtccaccgtcgacctggaggtgaagtgccagccggatgctgcagtggccccctccttcatgcacagcgtgttcagccccatcctgctgctcagcctggtcaccatgtgcgtcacgcagctgcggctcatcttctacatgggggctatgaacaacatcctcaagttcctggtcagcggcgaccagaagacagttggcctctacacctccatcttcggcgtgctccagctgctgtgcctgctgacggcccccgtcattggctacatcatggactggaggctgaaggagtgtgaagacgcctccgaggagcccgaggagaaagacgccaaccaaggcgagaagaaaaagaagaagcgggaccggcagatccagaagatcactaatgccatgcgggccttcgccttcaccaacctgctgctcgtgggctttggggtgacctgcctcattcccaacctgcctctccagatcctctccttcatcctgcacacaatcgtgcgaggattcatccactccgctgtcgggggcctgtacgctgccgtgtacccctccacccagttcggcagcctcacgggactgcagtctctgatcagcgcgctcttcgcccttctgcagcagccgctgtttctggccatgatgggtcctctccagggagaccctctgtgggtgaacgtggggctgctccttctcagcctgctgggcttctgcctcccgctctacctgatctgctaccggcgccagctggagcggcagctgcagcagaggcaggaggatgacaaactcttcctcaaaatcaacggctcgtccaaccaggaggccttcgtgtagtggctgccgcctcggaactgcggtctcctgcctgtgcttcagtgactgacccctgtcctgcccctccagagtaccccacgcacccccaggaccttcgccgtctccgtgccagcgttcacgctccctcccggggccctgcctcggagctctgtggtggaaggacgggagagggccccggacacgcgcgttttctcctgccgaacgcaggggctgccctgactttgctctgccgccccccggggacccggggcctggggtctctgtggtgcctgcagcaggagccaggaacgcccggcaggcaggcgctctcccgccagtgtctggattctgcctcttgccaaagcagagggggctgccatcccctgcctgccacctgcccctcggctgcatgcccacagccgtacctgcctgaggacaaaggcttgcactgtctcgcccgcgcctggcccccaccccctccccggccagcctgaggctgcctgaggaaggaaggacccgcttcctgttgtcggtgctaattcctttgtaattccagccccctgtcgcctgtccagggcctgcccacccgttggaggccggtggagaagccccacctggcttatgccctggagagggtttagcgggctgggtggacccctcgcctcctccccgagggccaatgccgcggacacgttttcactgtcaccctcgttctgtctgccacctgaagggaatttgaggaccgccgccagggcaccccgtacatacacacagctgcttttgtggaggtggacgaaaggctgtggccggcagacgtggaggtccaggccggggtggggacgtgggtgggtccgaggggtgtgtggggtcggggtgggctctaggagttagcccttatccccactgaccaggcgggagccgccaggcctgcagctgggccagtgcccaggagccatcctggcgtggggccaggagcttgtccaaggccacaggcccacagcaccccctgccggcgggctccgtggggccctggagctgatgacgggggaggcccgtccgcctggcccaccaacccgcccaccttgactgcccccagaagtgtgtcttgagacctcctgggcgtgcttagaggggtgagttgtgtttggatttttagttattttctcttcagttttattagacttcttttttataaagcaataaatccattttcctccgggtaagggatgccccttctggcatatcagttaatagctgcatgtgcctattttgagcttgagaagaaaaggcaggacaagactctctgccaccgaccagctccagccgtgcccagctgctcttcgtctctctgggggactgctgactcgggagggacagtgggccaggaaaagaccttcctccccaacccccaaacaaactgggcttgtgcagacatcttagaagtgtgagccaccctcctctaccgattttcccagccaaacaggcgaatcctggtccctttccatcc

SEQ ID NO: 3456 - protein, 561 aa, Homo sapiens; identical to SEQ ID NO: 3446

SEQ ID NO: 3457 - DNA, 48056 bp, Mus musculus
  misc_feature (1)...(48056): n = A, C, G, or T/U
tgaccgaggcagggagggaatggctaaaaacattcgaggtgtctacagcaaagagttgagtctacagctaagctaaaatgccgaatgtgaaccttcctcctttgtcccccacttccttccttccttccttccttccttccttccttccttccttccttccttccttccttcctctctctctctctctttcttccttcctctatttctgttttgtctttgttttttgtttttgggcttctttcttgttgttgttgttgggttcttgttttgttttcggttttttggtatagcattacttagggcttatgtggtcgagcccgtgttaccagctgggtagaaaagaaggtaattttatctatctgggtttcatttcactctggtggctctttttcccaagtcaccagtattgccagaaaatacctgcatcgttttgttctcactgtcagctctgtggacacccagctctttatcagtgagactggtctgtttttccacagctctgtttactgactatctacagcattcttcccaggttggttgtttattgtactggaccttattcttgctgggtttttgtttcgccaaatctaactttcctacccatttggacctacctggccccctcccttctgtattccacccaacactctcaacatttaactgttggttggaagagaaattgaattggctacagggcaatagtgtgaggattgagccaactttataattccctaatacagttaagtatacagacaaaaggggtcacgattatttgagttttgtagtggatttatttgtaaatgaaccatgcctgtcttataaatattactaggggttgtttctgactttgaaatggtttcacaccgtgacgaaattgcaaaacgcaccgagctcaatcctcctctcacaggcacatgaccagaaaccgcatacaaacaagttgtgagatagctaaagcacccagcattaagttatggagtgcaaagcagccagggaaaggattgccttgaggtaggattgaaatatcaggtacaggatgctgagttaaaattccatttcagagaactaattaattagcaagtaacattgcacgagggggtggggtgggggcagactttttatactaaacaaaaaccactgtttactgaaattcgaatttcctggggtgtcctgtatctttatttgaatgtgtcaactttaccaaggggtcgagatttaattcttctaggagacagcatttaaatttccccagccctcagactcctcaaggctgaacaaacctaagggtgttttgcaactcagcgattttgcaattctgtgactcagatgctaatgaactgagagagagctgttaggtaaggtatttaatctcttgctggatcaatttcttcatcttcaaagtaagacttatgcagccagtggatgacctggcccatgcctccttcacggataatgaaagctggatgttagttatataggagaagatatcctcattggtagctgctgtggagaagggaaaggcctgagttctgatttcagtgactgctgttttaaaaagagggaataaggccataggaacacactgagttcctgcagagccagggaggtgaaaagtcacagagggctgacccatgcaaatgtgcttaggtcggctccctctgcaaactggcggtttgggaagtcactatgctactgagtccctagccacatccttcctagtgattcctttgccaaagaaaggtttttcagacacttaaaaaaagatgtccctgagttacaagaggtcatataatcctcaaaggacctggggaaggactccccactttgagcccccttttatactgctccaagtaagggaagtcagaggctcacatggtcagctcttgactacagcagtcaacttttctgacagctttcaactccaaaggggtgtgaattgatctagcgatgccacacttggctgctggaatgcatctcaggtttggttaaatcttagtgcaagctttaggtttagacaaaacttgtctaaaattgtgggggttttttaaagttaaattttgtttgttgaccatttcataatgcagataatgtgtcgattactctcccctcaacctatgcatcatagctttggttgtatctgtgatcgattcagtctaacccgggccatcagattgagattagccactggaatctggtgggatcagcagtgagaatctatcagtagcaaacagatgggcaataagtttgtgtgtgtgtgtgtgtgtgtgtgtgtgtgtgtgtgtgtgtgtgtgtgtgtgtgtagtcctcccagtcttttctccatccattcctgactactaatgatcctattcttttgtagactcagtgttggtatctacagttgccatgagtttgtgatcacaatggtgggtctgcccagaagatggcattttgtagccatccttcctactttctgtcttttccattagagaacatagtataaatacatagctgaggcctgagcactcattcgtcatccattctgaacaccttgcacaaccatgaccctatttcctgttgttagctgaggagagaggtttctctgataaaggctgttgtagtgttgtctgtgaatgcagtcacatatatttagaaggtcctttggtattatgccagcttagctaaccctgattattcagcgccctgctagagcccatgacctacttcatcatggctttttgttttgttttgttttgtttgtttgttttttgagacagggtttctctgtatagccctggctgccctggaactcactttgtagaccaggctggccttgaactcagaaatctgcctgcctctgcctcccaagtgctgagattaaaggtgtgtgccaccaccgcccggccatcatggctttttgaccaagtttgtattatcaggcacggattctgtggattgggcttgaaatgggtcggttactcccgacagtagtgccactatggcatgagtttgcttgtttactgtctggcttttgttgtggttttgagaggaagtctcatctctcccagttgaccttaaagtcctcatgcagccaagattggcttcaattcctgattctcttgtttcttcttctaaaattctgacatgtgccaatatacctagctctagacagcagctcttatgtgcatctctgacccaagtttaatccacatgagaaaaactgagtgcagtggtatgcacttgttctcagcactggggaggtggggacagaggtactgaggagttcactagccagtcagcctcacccaaccatggagtccctggaaaagactgtgatcctatcttcaaatatgaggtagagatatcctgaggaatggctctctaaccttacatacttgcacaccaacacacatacatacacaaacttacatgcatacacacaccaacacacacaccccaacacacacacatacttatacacacacacatacatggacacacacatacatacacatgcacacgtacacacatgtacacacattcacacacacacacacttctatcttactgtgattattcccctttattccacccccagaacatcattctagttctcagctctattgcatcttgcctggtctgttggaatcggtttgtcagttccttgaacagcatttgccaggatagggtaaatgtaagagaagctcccaataaaagcaatgtgagtgagatggaaatttaattaacgtcatgaactcatacagtagctctgctcatgcagtcaaatttaggttcatctatcttgctattctgtcacaccagggccaccctgtccatctacagtgtccatgtcccaacctatggaggataagcaagcagaagccctgacttttaaaggcatgacccagaaattatgctgtaactcccatagaactgtctagaactcagccatatgaccacatttgctgccagataagctgaaaactgcaatctttattctgggcagtcatgtgttcagctaaaaaactggagtttctattcatgcaaggataaggatatagacctgtgttcactgtgcacagtggaagccacgtataactatttaagcgtattaaaattcagtagcagcaaacatcacattcctcagagtacctctaaggtagtcaatagccaagggtgacagcatagatttagaccattccaatcctcatgtgacactccactggctagagttactatcaatcaccaagacagtgcccctcccagatgtttcccccacatctttctatatgatcacgtcacctgggtgttacaagtttttctatatgagccccaaacattattttcacatatccatcctttctttactatggcacctatatgcccaacatctctaccatctgggatcctcctgtacaaaggtttctagcttgcatcatgcagaattgtttcaaacacgcctgaccgttgtgtgttccttgttcttcccttacggcttaacttgctctccttcctctcttgactaatttgctaaatctccatgtcgcctgctgttcaaagcattcccaccctgtcccactgcctttagaacatcgcaagcaatgttctactagaacatcacacactgagctgttatttaatgtcagatgtttatctcctccgtgaattatcttaccaaactttctacctagcaccagtgaacttattagactgagtgcagaaagggctcatggagactatgtgtggcaagagaaacgttcctcttttcatattcagaaaatactagtaacaactagtaccacttagctatgattttaaagtatcatttagattagtgtttgttcctaggtatttatgggatttggtcccaggacctataaggataccaaaataccaggatatctatacatacatacatacatacatacatacatacatacatacatacatacataggagactctaattctaattagctaagaggagacttgggatagccgttcaagtcttggtatgtgcatgggaagcatgctaagagaaactgaatgggaaccagtaatgtttactatttatgcaacagaagtctatgatgggtcacaagtagaatggcatttccagctcttaggaataagtcctaaccattaggaaagaggttagcaacatcccgtttctccaatattgttgtatatgataggtacatacatacgtacatacatgcatacatacatacacatacttacatgcagtttgcacataattgagcacatccttttgtatactttgctatctctaagttgcatctaaatcccaatgcaatgcctgaaggccacacaccacttcgcctgcgaggattcagtacagtacttgctgcataataaattcaaggttttactctctaagtctttccatttgacagttggttgcacatagagctacacagcccatggacacagagcatcagctgcatagaagcttctgtggcctgtccaggaaggtccggctgaacgggaagtacacagcgtgatgtgagcggtgtccaaatcctctcaggaggataggattgcagagcagccgctcctgggatgtgtgagcatggagaaatactcttaggcaattcccccaacaagctcgacttttctctctccaagggaagttatgttttgtcttttccagcagcctcaagactattcaagacacacaaagctaggaagtctctctcaagcccatttcttcgtggttgactttggccctgcaagaagcattgagtttaaatggctatatcatcaaaatccagggacattcagatttttaaaaccttcatttttattcagaaaaattttttttttgttctttcagctaggatttaaaaaagaaaaaaaaagcataggcaatggttttatacaaagcagtgtgaaagccttggtatgctcttgcggcttcagaaccacgtggtgacagacactgccattaacttctgctttgtttaagcagcattcctttgcttaccaaaatctgccggtaccatgccttcctctaagaggggagcctcggttatcccaaggcttctataaccagcaagagcatcatgagtctgtcggagtagcctgcatggagccggtgccattgaattggggaaggcaaacactacagccagtaccatgtcataagctgttacttttggttgagaggggaatgctgtttcatgcagggaagcatagcacatacgctgtgatgatgtttagaggaatcaacaaggggcttgggaccagaaagcctgtcctcttaacctttcactgatatttgcacatctaaccaactcacaaagtcccttgatgctttcacttcttcatttataaaacagacacgaaacactcttgcagggtcattattattttgtgaggatgaggtcctcctaggttgcctaggctgatgtccaacttcttggcttaaacacacgatcttcctgcttcagcctctgcgtgactgatagcccaggcacacgggctcgtgaccctttgcctggctttggcagggtggctttaaggaaaaaagaaaaaaaatgaaacaaagcatgcaactgtcgctgtcagaagagttaacctgggtaaccactttaccaaattgatccatgtgatctgatctctaagaggaacattttcaaaaccaatactaacaaacagacaatgatgacaatttttaaataggcttctaaattttatttgttgggaaatactcttaggaaaacttctcacaatcttttttttttttctactctagtccttcttccctcttcctacgtgtctacaaacccttgtacctgctgaatccctccctaagtcctaaaacacctcaagcagcatcctctggattaaggagtgttttacctcttctcttactccccctcatcagaaagagcagcatagactatgtacccgtattcgttactggttttcattgctacaagcaaacaactaagaagctatgggaggaaggttttccttagctcatgggttgaaggatacagcccatcatgaagaagagtgaatgacagcaaggctgagaggtggctgccacactctcaaccatgctgagcagagaaataagcattggtgctcagtttggtttctcgtgccccacttctgattcagcctgggatcttggcacacaggatggttcccggcaccttcagggagggtctttctttgttaaagcttcccagaagttctatttgtggagatatagcaaaacccagtaacagatctgagcgaacagttcatttaatcctcccagggcatctcaagtcaaagtttgagtgactctgttctgttctgactggtccatcactgtcagggaaccagggcccaggtgtgctctagtctcatcagcatcctgtctggggagcctgtgtacctcagtcagcagagcaggtgttctcccaaaagctgctgcagcatctgatgtctacgctatgacaaatcccttcctgtaaggaacaggttggtttgttttttttttcccacaaatgtttctgcagttttatagcaagatctatatccccaagcctaagaagaacgttatgttctgttaatgcagaacaaacaaaagaaaacgcacaaccaataaccaaaataaacaaacaccaaacaaaaccttcccattctcgtctcctcccaccattgcaatcctgggccctaaattgaagccaggacttcctttctgcaaatacacttgggatttatcctcataaatggatgcaaaaggacatcatatttcccatgtatatgttgcatgtacataattctgtaggtatgtgtacatgtaggtaggtgcatgtgttcatgtgaacacatctgtgtgaaggccagaggtgaaagccgggtgtctccctttgccatcttaccttttgaaacaggatctctcactaaacttaggctggctggctctacagctatataatatgtgacctgaatgtaattgatttcttttgtttcatatacagttctcaaagtctgttcatgtcgaagacggcatcaacatttcatttctttctcttaaagagaaaaagcaaatcatcttaacagcttgaggttcagagcaagaccaaaaggaaagtacagagacttcttaggtcctctcacacaatagcctcccctgcgtcgtcccccccgcccccaaggaagtgggacatttgttgtgattacagttcctatcccttaggttgtcatttcatgtggctaattttcagttatcttttagttagtacctttgttactgccccttgatcgtttataaggggagtgccatgtagtcaattggtagattttcaagctatgctagttgtcaggctttactgtgagtgcaaaaggagtcaggtgtgtgttttaagaattgtgctgttttaaaacttagggagaggccgttggcatactgacctgatggtatctggtgcttcgtgttagaggaagctatgtaggaatctgttttgcatcgggcaagtttctttttcactccctgatcctcttttacattgatgactccccaacccccacttctctacatttaacatatgagagaaaacatttaacatttgtatttctgagcctggtttatttatttcatttcatatgatgatatctagttccatccatttctctgttcccagaaatgtagttactcgtaaccccccccccccccacacacacacactgaagaacaatccagtcctcctctattggagccgattgtccttttaaaccaagtgtgcagctttggaatggaaagatcactcccgagtcttcatttttttccttctggctgactaattttccatgctgtctctagacacacacaccacattttctttctacatcctttggtaggcacctacactaatataataacttggctattgtaaacagtgccacctttcaaagccttggcctccatacctgtgaaatgagtaacataattttgaacctaaggattccttccaagatcaaagcaattgttgtggaaagcaccccggggcacttaaagagaaggacactagaatggtgggtgaaaccattccccggcatccccccatctttcattcgtttcaaaaagagtaaatactgcttcgaagctggccctaagtccctcaagaaggtgaagtttgaggagtgggggatgtgtgtgggcaggtttcctggatgggagcacacctggatttcaggagtgatgctgacaggtcctgcacatgtcaattccttttttccagtattcttctgagtgtattcactacctcttatctcttctctccctaggatctgctcttctggcaagtccttttagctttacagaggtttagcaaaaggggccgattcaagtctactctttccttggaaatttcttgggttaaaaaatagaaaataaaatggaggacgtaaaaagatctctccagaagaatccccctggagaaattccaatctcttctttataggacagccgtgttactaatccgtctttacacagcgtaaaaggtgaagaaataaatgaaaggaaggacgcagaaatgaatgaaggctggataaacgatatggggccaagattagaaggcagagatagattcttgctcgctgccacttccggcacagctgcttctaagattgtgggccatctcctacacaccgttgttccttcctctctgttgcagctcacacgctcaaagctttaatgcagagcaccgccctcccagcgctcctcccctttcggctagccacacccctcggctctgaggttccgccccacctaccgagcttcaagggaaatgaatggcagcggagccctgcgccgctccggacactgattggccactgggcgcggtgacgcgcaggtggctgcgggcgcacgcagcgagagcagcgggcaggggcggagccgggctccggggcggggcccaggcacccgggggcggaggagccagggaggcgggaggcgggaggccccggggccgtttaagcggcctccctcccgcccccaggcgcctgctctggcccgggccctgtgctgaccgacccccggtgtggcccactccggccctgcccagttgcgtggctcccgcctggcacgccagcggcctcggagcagctcaagcccatgaggccggcgcgccctgccgccggtgcaaaagagacggagctcccggcccccgcggtggagcggtggatcaatgcggttcaggaatcgattccagcggtgagagttctgcggggaacgtgctccgtcccgggggatcccgagccctgacgaggaccggctcccgggaagactcgcagttctgcgatccccttcctccaggcagcttgggatctgtgccccgggaccccgcatctgctttgcctcctccatccgcttgcaaacctagcttggcccttgagatccccatccagacaccgctgctgctagcttctagcagactactccagcctcagagccccctccccacgactccactcagggcctccacccttatacaaaccccaacgtgaggtctcttaaggctgctgcagcaccctgtggcgatgtttgtcttacagcgggtaggaggtctggcctgagctttttgaggtgttttgtcggtggttggccctagagacagggaaactgaggcacgcttctctaggtccagctttcctgatggtgtccggaggggttgtgtgtctcgggctaagaacctaatggtgtgctatttgggggatttttttttggcaggggcaagttagcattcaggtggagagacatgcctttgagaaacctggttttaggaaatagggagaaagaacggaggaggcgccaccggaaggcgggttgtctgctctacactaaagaggtggtagggtagcccgacttgagggacatagtgtggcccttctctcccgggtggattacctgcgtggaaggaatgatgaaggctgccgacctattgttcccaaagaaagctctgggctttaatgtttctaagtgggtgaaagttcacccatggggtttctggtaactccatccctttgtctgagcctggcagccatacccattcccagcccttcaccaccaacagggtagcctagtgtgatgtaccagagaattcaaaagcagaaatgcttaaaatcttccgagcaggctattgagtttgaagtggtctttctttttattttaaaatgtaaacacaccatttagttttcctttcccttctttcccctgttcactcattaatgcttatctcatttcttccagtctcaaagggtaaaagagccaacacaacatgcacaggatgagggtggtctttgcgctcagtattgggggagatcggcttgaagatttggattgctttctgaatattgcttattacttggtggctggaagtctggcactatcgttggaggagaactacgtctctatgtcaaaggcagaaaggaaccttggtctttctcgtttagaaccacagtggatttaagagactctgtaacgtgtgtgaacctcatgtcctgtgcgtgtgggttgtttgtctgattctttcctttgcatgtctttgtgggcttcctgctttcagagaccagtagctatattctgcaaaattaccccttccctatttgacgaagagtttgggtttctagtctatccttttgaattctataaaaagaaggaaaatgtctgtttttgcttattgtaccaacattcagagagctctaaaatgaaaaaataaaaaccacctcagctgattgagcaatcttttttaatggacagaattcactttcatcctattttggagtcttacccattcaaacattagaatacacaggggttatcttccagagtatcacagaatgtaattgttgagtaggtgtatattataggtgtatattattgtgctctgcaaatgttagttgtgtctttcttggtgatccctgggtctcctttgattctgattgatgcaatcccttcattacctctttctctattatagcctagactatttataagcatcaatttgaacttgagaatcagcctgcaaatacaaagtaatatcagaaaagtcctgagttttatgattcacacattaaaaggttgaaaattgtcttccacatctttttgtcttcatgaaacattttggtgtgcgtccagggcgggcagatcatacgggaggcacacactgtctctgaactaatatgttcttttccttgacatacatgctggtactcagttgaggaacagttcattagacaatggtttatagctctgcctaaataagaaaataccttacagttccactcaaggtggagcctgggtggttactgtggctttggatcatcttccagacttctgccatttatatgaggaaggctgtaagggaacagttaaagccacaaaaacaaacaaacaaacaccaaagtaaaccttaggatgtgaaaaaaattgccctgggctgcagcgtgttttcatccttgctttatctctctcagactgaagacactattcacttgcctacacacacacacacacacacacacactttccttttcctaacctctctgagaggtgataataactgttaccagtcagttactgcctgtttgtgccagctactggctgggtacttgcatattttcaacttaacaagtcactgaagagcagataagtttagagagtaacaaagtccttgcccagggagctacaggtaggaagaggcagaccttggaattcagtttcgtatctctgcagctgctggctgagctgttaaccctttctgtctcttagctggaaaaggagtttccttcctcagcccaagctgtgactaccctactgatgagatttttaagtcgagtgcacagaaaagtgtcttttttcaaaatctgaagcatttagaaagtctttgggggggggggctatctgctgtctctttggaccggttcttggcgttgagccatagaaggaggcggtcttctttcttccttctccctttaggaatcgccaagagtgtctgacattcttgagtgactgtctgaacaaatgccatgctcagtcttcagagggagctggcacggttgcagggtgctgggcagaaggatcggtggaagctgcagcactcagtaacgttgaagccgtcctgaggataaccgttgtcctagcctctgagttttctgttcctaagacctagcgctcttttggctccgaggctgcctgttgctcttctgtatgtaatctccagtaaagataaatggatcctgggagctggcattgtaggaagtcatgaatctctgtgcacgggaggctacaaagagattttcatctgctcgtttaataattatgaattaaacttcagcaaaagatgagcatcgtgcttaacactggaaatgaaatagtaaagaccacctcttagactcacattacagggtagaaaggtcagggtagttggctaatccactctaatctccttggcagcagggtgagttccttgctactgtcccatgttgtgaattctcaaatgaaagacacacacacacacacacacagccttagatttaatatgccttaatcagctcaattgctgggcttctcccacacttccacgttgttaacacctcccccctctgatactcctgaattattacctactaaaagtctatattccatctttgctactctagaccccgtggcaggagggcttgggaccactcttccctggctcccacatgcctgcacactctctcgttctctcttctgcagctctcaggcctgatccttctgcttccctggcaaggcagtgttacctctcccctgtgttccttgcccgggaacctaaccaaccattgagtctccgtgctcaaccattggccactggcaactttattttaaaaactctgtcaaagtcaactaggggcagggactcccagcgtcttacatgcaaaggtgcacgttcccatgtaatttttacaacatggaaagatgaattttctttcattttttttttaagtttaggagccaaattcttactagttatggtaaggactctacttgggtaggaaggacaaagaggtgctttaatctgcgatgtctggaagatctcttagtagatgatgtattagcttgagagaagagaagcaagttgaatgttctaggaagaaataaagagccccaagttcctgggtcacaggaactgtaaggaggaggttggggagcaccgatgagcaggaaagtggcaccttgaacgtggggagtggctgaaggcttgtgggtcagggatgaatcagagtgttaccttaagcattttgggaagctaggaaatagttgaagtagaggtacttctcatagttaagtgatatgatctgtttgtaagagacagttacggctaccgtatgaagaagagtctctggggacaggtagcaaggccagttatgaggctccggcttcacaggttggagatattggcctgctggtcttgatttcagttgggcgccaaggagtgtagtaatgagctgatttagaatatacttcgaaagtaatgttgtcaatatttggacttggggagttgggaacccaggagacctagcctatgaattctgcaggaagagctgcagcctgcctgctctctgagagcccagtccttgggtctggattattgtactaacatataacggtcagtgcctaactgttctttccctccatagttttgaagttctggggtggggtaaaagaacgcataagagtaacccaaaagccagaggcaaaagagagcattgcatgagaaaggaagtgaataagccctgcctcactaaccatcttgctaaatgtggttgccatactcagacctagatcagagcccctgtaggtgtgtctctcaaatccatggccctcatgtttcagggtagttgtgagtgaggcctaaaatatttgtagatgacagtatcatgtcacagtgtcaaaagattggagatctatgcacgctagccacttttcccagggcaccaagtgaccattaggttgcttcttgttcagtagagaggatttctgtaaatggggaccttttttcctctcatacatacataagcttttctcattcttctgggtggtgggtaggagagcctaggctcagagtgtgggagttgatttccatgttgcatctgcttttccctttagctctcaggaatgatttcttcagaaacaagaggaggaggaggcatgattgcagcctgacagattgagagaaattgaaaaattgtgttcttatttcccagcaggacaactgtgctgtctttctccatgagctccagacagtaggatgctcccggggtagctgcttttaactgtgtttctagtatccagcttacccattcatcgggacagggtacataggtcgccagagaggagtatttctatagcttctcctctcccccccaactgtatgcacagatatgtgcatatgtgttcatgagcatgtgtgtgttatatgcatgcccatagaggctagtaacaggtgtctttttcaatcaaccccatatttttgtggaatgagcatctcactgaattttgaatttaccgagtaatgtaggttaagtgatcagtaatggggatttgcctgtgtccatctctatagcactgcaattataagtagaagcttctcttcctctcctcctcctcctcctcctcttctttcccttcctcctcttcctcttcctcctctcttcctcctcctcctcctcttcctccttctcttcctcctcctcttccttcctcctcttctccttttcttcctcttcctcctcctcttccttcctcttcctcttcctcctcttctccttttcttcctcttcctccccttactcttactgctcttactcttgctactcttactcttcctactcctctaacttactcttactcttactcctataatgcttatcttactgtagctactattatgcttaccttcctataacttactatagctgctattggggctatagatgttcccttcgatgacaggtgcggatgtttttttgggcgactatcttaattttcttattcacatcttccattatacttacttcacaactgccaaactagagccggtcgtaggcaccgctttctttgacggtaaaagataccacacaatttgtgaatttattgcggtgagcgnnnnnnnnnnnnnnnnnnnnnnnnnnnnnnnnnnnnnnnnnnnnnnnnnnnnnnnnnnnnnnnnnnnnnnnnnnnnnnnnnnnnnnnnnnnnnnnnnnnnnnnnnnnnnnnnnnnnnnnnnnnnnnnnnnnnnnnnnnnnnnnnnnnnnnnnnnnnnnnnnnnnnnnnnnnnnnnnnnnnnnnnnnnnnnnnnnnnnnnnnnnnnnnnnnnnnnnnnnnnnnnnnnnnnnnnnnnnnnnnnnnnnnnnnnnnnnnnnnnnnnnnnnnnnnnnnnnnnnnnnnnnnnnnnnnnnnnnnnnnnnnnnnnnnnnnnnnnnnnnnnnnnnnnnnnnnnnnnnnnnnnnnnnnnnnnnnnnnnnnnnnnnnnnnnnnnnnnnnnnnnnnnnnnnnnnnnnnnnnnnnnnnnnnnnnnnnnnnnnnnnnnnnnnnnnnnnnnnnnnnnnnnnnnnnnnnnnnnnnnnnnnnnnnnnnnnnnnnnnnnnnnnnnnnnnnnnnnnnnnnnnnnnnnnnnnnnnnnnnnnnnnnnnnnnnnnnnnnnnnnnnnnnnnnnnnnnnnnnnnnnnnnnnnnnnnnnnnnnnnnnnnnnnnnnnnnnnnnnnnnnnnnnnnnnnnnnnnnnnnnnnnnnnnnnnnnnnnnnnnnnnnnnnnnnnnnnnnnnnnnnnnnnnnnnnnnnnnnnnnnnnnnnnnnnnnnnnnnnnnnnnnnnnnnnnnnnnnnnnnnnnnnnnnnnnnnnnnnnnnnnnnnnnnnnnnnnnnnnnnnnnnnnnnnnnnnnnnnnnnnnnnnnnnnnnnnnnnnnnnnnnnnnnnnnnnnnnnnnnnnnnnnnnnnnnnnnnnnnnnnnnnnnnnnnnnnnnnnnnnnnnnnnnnnnnnnnnnnnnnnnnnnnnnnnnnnnnnnnnnnnnnnnnnnnnnnnnnnnnnnnnnnnnnnnnnnnnnnnnnnnnnnnnnnnnnnnnnnnnnnnnnnnnnnnnnnnnnnnnnnnnnnnnnnnnnnnnnnnnnnnnnnnnnnnnnnnnnnnnnnnnnnnnnnnnnnnnnnnnnnnnnnnnnnnnnnnnnnnnnnnnnnnnnnnnnnnnnnnnnnnnnnnnnnnnnnnnnnnnnnnnnnnnnnnnnnnnnnnnnnnnnnnnnnnnnnnnnnnnnnnnnnnnnnnnnnnnnnnnnnnnnnnnnnnnnnnnnnnnnnnnnnnnnnnnnnnnnnnnnnnnnnnnnnnnnnnnnnnnnnnnnnnnnnnnnnnnnnnnnnnnnnnnnnnnnnnnnnnnnnnnnnnnnnnnnnnnnnnnnnnnnnnnnnnnnnnnnnnnnnnnnnnnnnnnnnnnnnnnnnnnnnnnnnnnnnnnnnnnnnnnnnnnnnnnnnnnnnnnnnnnnnnnnnnnnnnnnnnnnnnnnnnnnnnnnnnnnnnnnnnnnnnnnnnnnnnnnnnnnnnnnnnnnnnnnnnnnnnnnnnnnnnnnnnnnnnnnnnnnnnnnnnnnnnnnnnnnnnnnnnnnnnnnnnnnnnnnnnnnnnnnnnnnnnnnnnnnnnnnnnnnnnnnnnnnnnnnnnnnnnnnnnnnnnnnnnnnnnnnnnnnnnnnnnnnnnnnnnnnnnnnnnnnnnnnnnnnnnnnnnnnnnnnnnnnnnnnnnnnnnnnnnnnnnnnnnnnnnnnnnnnnnnnnnnnnnnnnnnnnnnnnnnnnnnnnnnnnnnnnnnnnnnnnnnnnnnnnnnnnnnnnnnnnnnnnnnnnnnnnnnnnnnnnnnnnnnnnnnnnnnnnnnnnnnnnnnnnnnnnnnnnnnnnnnnnnnnnnnnnnnnnnnnnnnnnnnnnnnnnnnnnnnnnnnnnnnnnnnnnnnnnnnnnnnnnnnnnnnnnnnnnnnnnnnnnnnnnnnnnnnnnnnnnnnnnnnnnnnnnnnnnnnnnnnnnnnnnnnnnnnnnnnnnnnnnnnnnnnnnnnnnnnnnnnnnnnnnnnnnnnnnnnnnnnnnnnnnnnnnnnnnnnnnnnnnnnnnnnnnnnnnnnnnnnnnnnnnnnnnnnnnnnnnnnnnnnnnnnnnnnnnnnnnnnnnnnnnnnnnnnnnnnnnnnnnnnnnnnnnnnnnnnnnnnnnnnnnnnnnnnnnnnnnnnnnnnnnnnnnnnnnnnnnnnnnnnnnnnnnnnnnnnnnnnnnnnnnnnnnnnnnnnnnnnnnnnnnnnnnnnnnnnnnnnnnnnnnnnnnnnnnnnnnnnnnnnnnnnnnnnnnnnnnnnnnnnnnnnnnnnnnnnnnnnnnnnnnnnnnnnnnnnnnnnnnnnnnnnnnnnnnnnnnnnnnnnnnnnnnnnnnnnnnnnnnnnnnnnnnnnnnnnnnnnnnnnnnnnnnnnnnnnnnnnnnnnnnnnnnnnnnnnnnnnnnnnnnnnnnnnnnnnnnnnnnnnnnnnnnnnnnnnnnnnnnnnnnnnnnnnnnnnnnnnnnnnnnnnnnnnnnnnnnnnnnnnnnnnnnnnnnnnnnnnnnnnnnnnnnnnnnnnnnnnnnnnnnnnnnnnnnnnnnnnnnnnnnnnnnnnnnnnnnnnnnnnnnnnnnnnnnnnnnnnnnnnnnnnnnnnnnnnnnnnnnnnnnnnnnnnnnnnnnnnnnnnnnnnnnnnnnnnnnnnnnnnnnnnnnnnnnnnnnnnnnnnnnnnnnnnnnnnnnnnnnnnnnnnnnnnnnnnnnnnnnnnnnnnnnnnnnnnnnnnnnnnnnnnnnnnnnnnnnnnnnnnnnnnnnnnnnnnnnnnnnnnnnnnnnnnnnnnnnnnnnnnnnnnnnnnnnnnnnnnnnnnnnnnnnnnnnnnnnnnnnnnnnnnnnnnnnnnnnnnnnnnnnnnnnnnnnnnnnnnnnnnnnnnnnnnnnnnnnnnnnnnnnnnnnnnnnnnnnnnnnnnnnnnnnnnnnnnnnnnnnnnnnnnnnnnnnnnnnnnnnnnnnnnnnnnnnnnnnnnnnnnnnnnnnnnnnnnnnnnnnnnnnnnnnnnnnnnnnnnnnnnnnnnnnnnnnnnnnnnnnnnnnnnnnnnnnnnnnnnnnnnnnnnnnnnnnnnnnnnnnnnnnnnnnnnnnnnnnnnnnnnnnnnnnnnnnnnnnnnnnnnnnnnnnnnnnnnnnnnnnnnnnnnnnnnnnnnnnnnnnnnnnnnnnnnnnnnnnnnnnnnnnnnnnnnnnnnnnnnnnnnnnnnnnnnnnnnnnnnnnnnnnnnnnnnnnnnnnnnnnnnnnnnnnnnnnnnnnnnnnnnnnnnnnnnnnnnnnnnnnnnnnnnnnnnnnnnnnnnnnnnnnnnnnnnnnnnnnnnnnnnnnnnnnnnnnnnnnnnnnnnnnnnnnnnnnnnnnnnnnnnnnnnnnnnnnnnnnnnnnnnnnnnnnnnnnnnnnnnnnnnnnnggggaacttcccctgcagatcatcctcgttgactaaactggtcttcaggtcacaggctgttgaggtttccgtgggctgaagaataggatctttcttaccccataggctttgagctacacctgaattcaagacatactctttggattggatagagttttgaagacccagctgccttgtgtgtgtctaagaaagcagtaacctaagttggcttttgggtcttacagctaaaatcccgagagctttccagttctctcttgtacaccaggggcactacgagaaagagagccatagctgtgacctagcaaggagggacattgaactttgcagccttttcctcctgtgtttagcgttgagcaattccaccccatacaaagagctccgctttcctcattatgaaaggattattgtgccgcctcgtgaggttattgtaatgcaatatggtgaataagataataactatgaaaataatctgaaaagtataaaatgtaggacgaggttaccgtgacaaccatcccagtgaagatgaggtactttccaaacaatatcaaggtccttggcctggtaataaggatgtaaaagtgtttgcatttgtcagaattaggctggaagacggagcatcatttctgtggaaatgggtgctttaccaaataaaaccttaaataattaaatagattaaaccccagagaagaaaacaattctcacaagaccctggtcatcttggagcaaaggaccactgatgtagcggggcatgaactttgagctgggcatggtggcacatgcctgtagtcctagcatggaggaaagagaagtggaagaagcgtggggccggcttcagcactatgaacgagactgtacttctaatcagagatgtaaggaaagaactttggtttcattaattgtcaaaaccaaagtcctaagcatgatggcactaagacttagaatcccagtacctgggagcccgagacacaaggattgtcattcgtttgaggccaccttagattacagagtgagttccagtgaactgcagagtgagactatctcaacaaaacaagccagaaaaaaactgtcactagcagggagacagggttagggagagagctcttcttgtccccactttcctctgtatcctttacagtactgcctgaagcttgcattctgccaccctttcctcgaaggtgacagttccctaggattaaaataaaagcacagcaccgagccacagggtggtgagagacacactcacaggagattcaccagaacacctgtactggcttcccaggacactcggtcacaggacccagaggctcctttgggaggaggacacttcattatcttcttggcatggcctgacagttgtggttgtcttagcatacttggctctgatgtctagatttctgaatcaataaagagttgtagatgcctacttcagtattcagggcctccctggaagaggctggagatgaaggtataatagaaacgagattctcttgaaccatgaaaaattattgctagaatcacaagtcatgagtagttttgattgttttattttgttttgttttatcttgctcaaccttcaatcaaaccatttttttaagttcaatttaatctttttttacttattcactttacaccccacttctggtcacccttcacacagtctttcccccatctcccctccccttctcctctgagtgggtaggcccccgttccagatatcccccaatcccactcttgcactttaagtctcttcgaggctaggcgcttcctctcccattgacagcaaggcagcccaactagaagaacgtatcccacctataggcaacagcttttgggacagcccccgttccagttgttcagaacccacatgaagactaagctgcacatctgctacatatgtgcagggaggcctaggtccagcctgaatcacaccattattttttaatgcctaaccaagccagaattaggagagagaaaggaagtcccaatttctgactatgcactgggtaagtgtcttgaaaacataaccaatatcaccacatttattgttctgtgttctcaggttggtccccctcttatgagacagtgtgaccggagaggtgacttgtggggagttttcaccttatgagaaagtggtatcgggaattgcctctagggtttcatgtgtgccagataagtgtcctgtcactgggctgcatccctagacctcgttcttctttttattttgagaacaagtctggcttaggatagtcttgaacttattgtatctcccaggtaattaatatcatctcaacttcagaagctgggaccacaggcctgtgccacaagggcaagctggtggcaggttaccagcaagactctaggtttgactgtctgccctaacagtgcctcgaaagcagagttagaaagcccccaagccttgctgggaatcaaaattatctcaggggttcaaaacaagaaattaaacccttgctttctccctcctgcttcctggctcctggaaagtagagtcttgcacccgtgagtctgtggctccctgtattcccaggtgatttttagacgtggtttgatcgaatgtttgcttctttagacccgtgactaagtgatcataactaaactgtagcttccgtagtatggagagccgtgagcaatcgccattacaagatggcgctggcttccatagtgcctaactggtaaacaagtaatgtgcgcaggtgcaagagtaaattcgtgccaagtcactgcccatcctggggtgtagtaatggggtgatgggcaaacaaccaatcagatgctgacatgccacacggaggggtatataagcagcaccattttccgggttcggagtcatcctcctgttgaagcaataaagctctgctgtagaagaatccggttgcccgagtgtgttttactgacgagacattagctcaggacaccgtaccattcttccgtacagatctgatttttatttatttgctctcatgaccctgtcagtccacttggccaacagcatatgtgtatcatgaggcaatgtcaagggcccaagcgccacacaatgatagcgttccataccctggaaaccaaaactagattgggaacaacagatggagctgggtggatggcacctgcctgtaatcccaacactgtgagacatggaggcaggaggatcagtagttcaagccgaccctcagctacgtggctgacagtcctctgtatttacacctttatttatttattcatgtttttaactattatttatgtatgtgtgtgtgtgcatgtgtgtgaatggatgccgtgtgtgtgtgtatgtgtgtgtgtgtgtgtgtgtgtgtaggctggaagagggcatcagattctctgaagctggtgttacagatgggtgtgagctgcctgacatgggtgctgggaaccgaatgcaggtcctttggaagagcagtaagcaccttttaactgccgacccatctctccacctgactgcactcataaacgacctcagtaaagcacagcctccttagcatgcgttttgcgagtccagctttgactttggaccagtttcaagatgcattcgccaccctttcacagcaaagacgccatatttatgtatgctattgctggccctaaactacggatttcccctttttgccacttactgtctaccctggcatgtttaaagtgaaagcttgcttaaagatgtgtgaaaaaaaaaacccaaaaccaaaacaaaacaaaacaaaaacagcaacaacaaagacaagaatgtgaactcagtaaacagaagtcttcaaaatgggatggagacctgttagaacctcagcctctcagcctctgggtcttgaccccttagggggttgcacaacccttttccatgggctgcatatcaggtatttacattacgattcgtaacagtagcagaagtagcaatgaaaatcattttatggttgggaggtcaccacaacatgaagatctgtattaaagggtcttagcattaggaaggtcgagcaccactgtggtacaaggatgtgggtggggcaagcaggagctggtaagagattgtggaggggtgactatgacagaatatgttatgtatgtatatgaaatggtcaaaaaaaaaggagtttaaaccaaagaaaggatttttagggcttggtagcttggcatgaggactgagccatgtactgtgataggaaccaaggtgctgtctcccctcacagcatttcatcttccaaacgaaaagggaaacatcaaagactcatgtcacctgactgccgtggggctcccccatctcacgtccggttacgtgtatgacctaaaactgtagagcttcgcctgtggcttcctgtcattaaaaagcagagctgcggcttggaagggcgagctgtggatggccaggggcagtgaagcaggcagagtgattgtagccttgcagagtggtacccagacttcctgtctgaaggttttgacccgttcccttaccctcttcccttcccccaacagaacagtggagcattgtttccacatgtgcgatcggatggtcatctacttcttcattgctgcttcctacgccccatggtaagatagcatcctgtaccctgggaaagcatctttgtgataaagaccctcactccttcccttcccttccccttccccttcgaggtcctcctgcgtgtactctgcccctcccacagggcacacttgcacccccacccccagtttggtttacttggctacattactcatgatttggaaggactgtctgcttgagattatttggggggggtgctgtgaacttgggtatagctagcaggctccccttccccctccatcttctttccatatatctctgctgcttttcagaatatgtgacgattgaatttggtgaatggagatgctgtaaatgcatatgaggaaaggcaagcgtcctttagaaatgtataccctttgtttctgcccactccgtagcccagtagctactgtccacacatttctcattactgctaactagccaaacgagttaaatatatcaagtctcctgtgcagtttccttgatcttactgcccttctgaggtagatcacacgccttcaaagccaaaactaaagaaactatagtttctcccctagacctggcccagttttaaaacctcagaacttcccattgacccatctactgctctagtcaatagaaacagcaggcctctagaatctgcctcatgccgactcagtcactcaaaagaaatgtaattatctgtttgaataaaaaactgtccaaggcctctccagtacctctcactaaattataggtctgattcatatacgagcaagcatgcctaaaagcttttgtgaagcaatttaaagtggataaatatgggaaaaaaacaattaagcatgaactcaagaatcacacagagagtaggcagtctgttcctgtatagttttagatatgtccatagttaattttccttttcgggaatattagttttatagttctagccaaactgaacatttgtttttcgaatttgtttttaatatacccaggcacatgacactgtggtatgttgaactgtgacagaacaggtcccatagcacatgctgaaggagttctcatgttctgtcttggcagagaggttgctaaaggagacatgtatattaggtgtctgctgtgggtatgtgatccgagttcaggattttattctgggttctcaataagctttgtcagcatcccaaatatgtagtcagaaataaaaccgccagtagcctttacttcagtgtgtccccgctagggaaagtcaggtttgacagcatactgacatgtctggttttagctggtgctatttttaaatcgtgtgtaactctgaatactaaaattcgaccagcagtttttaccttgaatgattagtttcacccaaacttgccaaaagcctccttgctatgttgaaggccgtatctttctgtcaccctgttgtttgctgtttgttgtcactaggagaacatgggctcccgattcctgtcatttacgcctttgtcatttgcatctataggttaaatctccgtgaacttggacccctggcatctcatatgcgttggtttatctggctcatggcagctggaggaaccatttatgtatttctctaccatgaaaagtaagagaaagatcacttccgttcgataatttaacaattaactgcctaaattatccctgtggtacattgcagtttcctctgtgctggtgtctcacaatagtagaaatacataaaaagaaaatgtattgctttttaataagtctttaatgccatctggaattcactattgctgcacaggctggggtgggaaggcaaaaatgtgtcacaatgaggttgaaggacattttagagccgtagggactgttgttattattattattatcatcatcaccatcatccagaggcaagctagcccctgtctgtttcacagatgtcttaagtggaaactagttcccttccagtttccttggggatgacaggtaaccgatgataagtgtcacagcacagtactcacctacatagaaatctggagagtgtttgaggaaagaagctagtgttggacacagcttttccccttactcacagtgtgagtataaacaaaggcagattgaagtgcaccgtctggctccaaaggagaccttcagggtcatcaccgtcagctgtaggcatgaaaattacccacatgagagccggaagaaaatgaactttgctatgagattgtcttctaagaaagttagaagctgcacccatgaagttcaccaacatagctgcctaaacgagatctgaacaaagagaacaccaatagccatattgatcctgaagctgatcctagacacctgactccagttaccccctgaatgtaacaaatgctaagtagattatgtaatatccagcaaatctgtctgaaggcacacgcgctccttgggggcaggcttctggattgtagcctccagatagcatagcaaggaaagacaggcctttctggtaaccccaagaccattctccctccactagggctaaagttctcagatagcctgcagcctagtggcatgggacaggaaatatgcgtgcaaaatgaagagacaaacagaaaacgcatcctgagctctggctgctgcccactcctggagaaagctgtgttttcacctcccctcaccctttcaaggtccttttaactctggatggaactgatgatgggccaaaccaagaggatgggcaagggaaacgtattgtactgggctagattacagctagctttgacagcaagcatgttctaggcagcctgggtcaatttctgcccttttcatcctaagagaaactttaccacattgttactcagtgtgttagggagaggctaggtggtctcctcgtgggaaatgcatcccctttgagttgtttaaaagcttatatttcgctttcaagataaagaacagggaagctggtataaagcagtcccaaggggtgtgtctaaccatttgtgtgtccctacaggtataaagtggttgaacttttcttctatctcacgatgggattttctccagccttggtggtgacatcaatggtgagacgtggctttagaattttggttccttcctccctaaatccctgatactctgatgtaatgagaaatgtgcagttttcccttttggagctttgatatatccattaactatagacttgagagagaaccatatgagttacactagctatccccaaggcttggcaacgctgtgtatatattgggtgggtttgttctgtacttttttgttttggatgatggcttcccccctcaacccccatctcatcacccttctttcagagacttgtctaaaagattagaagtagctgtttgaggttgagtaatggggctatttaagcctgactctctggaagaggctatttggagttctgttatggtaaagagagcatgaatgactgacataaaatcttaagaattcgagggatctttgaaggttgtggtggcccaccgtatggtccctacccagctgaagagggaaagctgtaagtttgaggtcagaaggaaaagcctagcatttgccccagcttcgtgctcagtagttttcaagtccttttacttcatttttttaaaatttgctttgaagtagtagtagctctcgttctaagaaaggagagtggctttaaaacaaaacaactgttattttccttttaactttgcttgagaatagcttgggaacttcagtataagaatgttacattatctttagtgaattcttgtgtacggtgtgtttcaagttctctttccagtggaattaccatgtagaaaaccatagacacctgtcactttgagtccacaactatacattgcagtctcatccagctctgctggccactggcttacttcctccgatgtcttgtgttcggcactggccgttagccactgtactaattaaagaactgcagcttatttagttttaactcatttctttattctcagttgtccagagtcagggttggacgtgagatttcattactgagtttctacacacaatgtgagaatgtaattccatcccctagtgctcacctctccccaccccaatccccaggacccccctcccaccccagggctttcttccctctcaccaaggcccaactcccctcccactccccagggcccacctccagctcccaggacccacctccctgtctccagtgcctacctcccctctcactccccagggcccgccctcctcagaagagtgccccttggagctaaaatctggttctgaggtttcagaaaacattgcttgtgaaagtgtcaaaaattatatttcctcgatatatgagtttgatggtagttttagtaatttacctagcacgactgcacggataaatacatattatctatgtctgtgtgtgcgtacacatagatgtacatggctcacttggcaaaggcagcagaaaaggatgagaagaggtaggcaggcatgtgactgaagtgagaaaactgggccacggctattgcatccatagggcagttcaggacagccagagccataatagcaaagtctatgtggattggttactaattattagagcagtttcaagtcaattccctctggctgtcataaaagcaggtttatccagtatttttactggcccgaatctgtaatcggccttttcctaggtgctataatagccagtgactaatgtttatgaaaatgaagcagggtaattcacacactgctgtcacagaacttagggtccaacagatagacagtttccgttcaataggagactgtaataaagttttatgatatccccgatggcaggggatggggaagggacaactcaggttgctatggaaacatgaggttgaagtactaaaataagtgataggtatgctgattcagaaagacaagtagaaagcaggaacagtcagtgtgaggcaggtgttaccaacagagggtacagcacgcctgggagggcacccccgcctttggagagctgataataatctggagatctagacagagtccagatcaaaagggttatgtaagagtgagcgctgagctgtggagctgagtcctgggtctcaggcttcactcttctgccacgaagagctagagcgctcaataatgaattaaagctgcgggctctccaagcattaagcacagagagtgcggagcgggatgcttgaaggcagagaaaccaaaagctgagctctgggttctacccctcccccccaccccccgcccgcattgttttcctgtagactttccaaatagcaattaaaagagagcacagagaacagctgtcttcctagaaatcagacgtgagacagttgatggggcagggacctagggaggagagagctgccgagacggacctgcaggaatctacaaaggagtatgcgcggccaggcatcaagctggatgtgtgcagggcagaattctggaagccctcactgggaataaccatttgatggcgaggagctaaacaatgctgccagaagcactgaattcaggggaatagtggagcgcccaccattccaagtggttagaaccacatcggatatcacacatctctggcttttgggtgaccaagcttactttaggggcagaggaactccgcccctctgtcttagttgcttttttatcactgtgacaaaaaaaaagttcaaaaagcaaacaaaacaaaacaaaaataacgacaaagcacaaaaagaaagggaggagggatttgttctggctcgtagtgttggaggctttagcctgtagttacttgactgttggctgtgggctctctcatgggaaggcgtgctgtggagagagcagaagagggtggagtacctcacagcagacagagaggtagctaagaaggagccagggacaagctaagcccttgagaggcatgcccctgccaacctgcttcctcccacaaggccccacctgagaataggtcagtatacaaaatcttctgatgaaaataggcaatgtacgtagacaataaagcagcctttggtactaaagaattagaactgttccacaaaatgatagaggtgctccaaacgtttaaagattcgatggcatacgcctatataaacacttgcatctttgaagtgactagtaaggaatatgcaacctgacaagttgtgggctgcagcccaagccgtgttgggaaagaggcacggtgctttagatgactctgtgagtgtgcaggttgctttgatgaatcatcctgactcggccgaggtacccagatgtttgcccattaacagcctggttgttgtgagggtacttcttcagtaacattagcattcaattcagtagacagagagtatattccctgtggtgtgtgggggcctcaacctgagggccttaagataaaaggactgaggtcttcctagcaaggatcctccccatacctttggatgtcagccacagtagccgcgagttaacctggatcactggctgccaggcccctgcagaattcaggcttgctgttctgtaattacacaagtcagtgccttaaaacctataagtacacacacacacacacacacacacacacacacacacacacagtgagagagagagagagagacagagacagagacagacagagacagagatagagagagagagacagacaccctgttctgcatgcagacatacacatccatcttactgactctgcacctagtcttgcacagggtagtctggaaccctgactagggtggtaagagaatgaacaaagaacaaacgcatgtacagaaaatctgggatccaggtaaggtgtgctcattctgacagagggacaccaatgatgcaacctaaaacctgagggagtttatcatgtacgagcacgagtagatgttagctagcgttggaaggtctcgcaggggagcagtctcagtacagctgtctgtaaggaggatgctgcaggtgctagctttcgcacttctgtaggtcaggtgctggcatttggagcagagggatgctttgccatctcttgaatgggaggcctctacatgcctgtgtctgtgggaatacacatttcactctaggcttcctcagtccccacgtttctaattctttgaagaactctgagtaacacgattaaaaagaagaaagttttaaaattagtgatgtaagcatctatcttcagatggaaaaagtagagggctgtgggtatggcttagtgatgtaggcttttctgggcatctaggaggcggtgggttcaaccggtagtattgaaaaaatagacaggcagacacagagagagagaaaaagaaaaggagagagagaacacaaactcaacaactagaaaaaaatccatgaaaccaaaaactttgaaaaggttccagtcatacattatagcaaattttatactcagggtcagaataataataataattgtatacagactttcacaagtagagtggagcttggtgagatgggccatgtttgcatttccagtacctgggaggtagaggaatgaagatcaagagttcaaggcaagccaaggttacctgagaacaataaattaattaatcaatgaaacaaacacagctggattggaagaaacactttctggttcatcttccagagccaaaattaccttgagaaccagatgcacattgcaggatcactacagcccagtacccgtgaagcagaaacggctccagaaggctccaacagagtatcagcaaatctagtttcatgaggatgcaaaagaatcatcatcaggttagcttttcctgaagccagttgctggagccattgctacatcacttagaaaccagtcgttgaaatttgccacattgtgaggaccaatgaaaaagagtggctcttctcaactgatgaaggaaacacttttgacaaggtccagtattcaaccgtcattttaaacgtcttaacaaacttagaatcctcacagatctgataaaagacaattaaggaaacactaccagcaaataccatattttttggtgaaaggctgtgattggtaacaacgcaagaatgttatgtcctcactccttctagtcaacattgtagctgatgagctagggatgctgtaagagataagagaaacaaaagcaagccagtggaaaagaacagggactttttaatctgtagatgaaccttcagcacagcatagaagccaggatctacagaagaatgagtttagcctcacagttggctacaatattaaaagaagtaggaacatccttcctcaggagacgtcacacctgtgtgtgccactggcctgtctctgatgatccctgagaagttaaggcacactgtgagtattcaatgctaatgtcagtagaattccaaaaatagccatcgctgcacttaagggtgtggggaaaggatatgtttgtgtggagataaagaatcagacaccaggaggactggagaactagggaggatggggtggagcatgtggtaccgttatgcagaatccaggccagtataacatcccagagggactcttcaactgggagaaggatggagaatacagccagattctgaccagtgttccagaccactaattcagtgaggatctaggatgactgaagaagattggagcccacagagggctgtgccacgtctgttgggactggaccatgggtatgtccaggaagaaatgagtctatagactatttattaacattactcatgttaataaataagtaatgttaataaatagtttatttaggaagcagtggcatttatatataaacacaactcaatggaagaagggaaatgtttttaagagaacggtttagaacacttgaatatcaatttcacgtcatgcagacactccatttgaagtataggcttagctatgaagcaagattcttaagatttcttggaaacacaaacatggggaaacctgggacatcttgtcatcacaattttttggatagggacagggttttggagccacagaaagaaagactgtgaaagaagaaaaagtaagttgggggaaagttcccaaatgaaagcttttgcttctgtgaagaaaatggaccagcggtcatggttctgcaggaaatacttgctgtgtctgtggtaaaggacatgcatcctgaaagagccagctcttaagtatatgctcagtctctggtcctccaaatcagtcctaaagccctggaaagatggatacaaagttttgataaaaaaaacttgagtgaaaaaaaaaaaaagcccatccctttgaaaacatgtagatataattagtggtcaagaaaatggaaattagaaccccagtgggctgccacaccacagcatactgaaagagtagttgtgattggagccctgcactagggtgggtcccaccaccgtgtagtgtataaagtgatagggcctgcctccaaaagtttagtttttacatttttagtttctagtaaaattaagtgcatttattctgggacttactggtttccttcaacagaaatggagacatatatcacaaaaagactcataaagttaaaattggtcatatacattgcagttctcaaaatagcaagaattaataaactatgttaagtggaggaactattaaacaacaacaacaaaaacaaaacctacaaacaagcaaacaaacaaaaggaaaagaaaattaaaaatatgtgcttggatttatgtgactcgcagcacatcagcagtataactcctcatatctgaagtcctagagtgggtggtcctgtatgtggtggtagcattaagaacagtggtcaccttggtggctggaagggtcaagaattgattgggactgggatgcccaaggactgacagaaacatttgggtggatgttgtttgcatttcttctaggctccaccccacagttacctggcaacagccaggtatgcctgactcaaagggcaaaggttgccatggattcttagggggtgcaggagccccaagtgcaagtgcaggaggctaagaaatgcagccagacagtgtcatgtggttgggcactgcctccatctgtcctcagagtcatctcgtttctggcttggttttgatagacactaatcctctttgtccaaacaagctaggaacccaagcaagtataccaatcagcttttacacacaatctgtgaagaggcagttccttagaacacttttccacgtcagacttgcagagacagggaagatgctgcaggtaccacctggtagaccccgtgaagtgctcatgtgcatttgtgcacattcatcttcacgaccctaactggggtctcattcattatcaatagcactgactaatgagaaacggagaggtcaggtacttttctcaaggccacggagttccctagtgtcagaatggggacctgaaccaaagtgttctggtgtctgaactttcccttgacactggggaaatggacatttttagagtaggggtttgtgtgattaattttgtgaggtatacagatgagaatgaaaggtggaacagaccaagcttgactatacctattacatctgttgtgttttataaaaaaaaaaagaaaggaaggaagaaaagaaaggaaggaagggggagagagagagagagagagagagagagagagagagagagagaggcaggccagggatatgtttggtagaggctccatatgatctgggggatcagggtgcctctgcgggcccatgctgaggtatcccttcccctgaggcaccatcctcacagagatacagtatgaaatagaggttatttagggcatggggaggagacttgagggggtagtagagacagaaaagcaggaggggggaggaagggagggagaaagatggggagagagggaggaaggaggaggagaaggagaagggagggagaatgtgaagagaggggggaggggagtggggagagaagggacagagaggaaagagaggaagaaaggaaaagagcaagagagtaaggaggggacaagcatccctaatgcacatccaagaaatgttgaatgatcggtgttggtagccctgtaacctgtatgcagcagtacaactgtatgactaattggcttgaagtttctggtcttagattttttttttaacattgtaatcaatgtctagttgatcaagtctcttcttaccaagaaaagaaaatttggtataggttattttgagttgcctccttcctaatcttttaaccctataaaaccctgaagttaatgggaatgttggaaatagggttgatcatcacactggaccctgtgtcctcccagcggccttcagctccatcttcttactgcttctggcgaggcccgtgggctccttcctacagatggctgagcaggaatttcctcttgcttttgcctgacttggccactgggaccattgggccacatggactagctccaaggctgctggcattcgcacccagctgtctgcattcttgttcccttctaagggctggctaccctcttggtttggcctctgcttctccctcgggcaccgccccttcccctgcagcaccagtctctttatagtttactctgtacatgggtctgggtctttggatctctcgagacagccttaacaaaaaaaatcttgcttttgacttaaaacatataggacttagatttaacacccagaagcatggggcaaattaggatatccctaagacagtgtgatgtgtcccttgtcagtagtaaagactcccttaattcgtacatgctgcaaagatcagagggagaaaaacccaatcggtacatgtggtgagagggaggtgaaggcgtgcagcaagcctggctaagatataaattataaaccagtttcttgggcctgtcagatggagaaggaggcttccaaggggtaatctggtacatgaaggtcactcagccttggcaggcacgtcacggctaaccatgattacaatctgcttaggcacagttaaatgagcagaattagcactgtcttgtggagcctataatgtgtgcaatgatcggatccatgtctgtagatcgagagggtcaagctggtgaggcatttacagttgctttctgtttacagataaggatgttgttcactgcgattttaactgttcagaaaaccaggagatttcttgggggggagggaggggcaagggcagtaactcacatcagagtaacatcagatcttcttcccccaccctcccatctctgttgacagaataacactgacggacttcaggagctcgcctgtgggggattgatttactgcttgggagttgtgttcttcaagagcgatggcatcattccgttcgcccatgccatctggcacctgtttgtggccacggcagctgccgtacactactatgccatttggaaatacctgtaccgaagtcccacagactttattcggcatttatgaccagtctgtgctaggttttcaaatcagtattatcacgatggaggcacttgggtggggggaggggcggggggagaactgaatgtcgcacacagaagaagagtgagcaaacttgcactgacttcgttttaatttttttttaatataattactgtgaaagtataaaagctgtgtctcggagttttcctcttcacaggcaacagatgaggtagtgaatcaattcttcattccattccactatcatgaaggactcgggagagacttggccaactgatgtttacaaaccagaaatttttgtatttttcttttacagattttaactacgatgatttttttctaaattaagtaggtcaggttgtcaaagtcagtgcaatagtaatacaacttcctttttaagaaaacccaaagttgtttctatcacgtttcccgttcactgtgtaaaagaatcatggaaactgaacactactttttaccatgtttcatcttgacataacatggttattttttaaaaaggaggctttagttcttttgtaaatttttaaagaaacgattccattgacgcacacccccactggctcctcatccatgcgaggtttttgcagcaaacggtcaacattccacgaacaaacattatacctcttctggcagttttattaagtgtggagaacttgccaattttttagaaacactgcagttttttccaaccttttctgccaatctctaaccctgaactcagtgctgctttgggctgacatccatgactggtgtgggccaccaggagtaagacagtagtgttttgataccatccactttttcagaagacataacttcgctgcatgcctttgccccagtttttctccagggtctctctccacagtcggggaggatcctgtccggattatgatagtattattgggttgcccatctgccatgagctttctgaatcatggcaaattgtatttgccactttggtgcccaacggttcaagtcattgtggttaagccacttaactttattgtatgagtttgatattcattttaattgtgggactagacacataaactcacatttctgccttttcctctgcatttctcaatatattatgtttttctcacgccataaataaaacattgattggcaggttgaagcttgtgtcagttgttgatgggttttatgctgactctgtggagtgatatttatatattatttttagtttcctctcaatgtcttatattaagattgatgtattagttgctttgttggttaatctttcttggtgtttaagagaaatgaagtcaccttgcctttagatcagatgctattataacctgtctgtctaggaacaagctgtcagactaaagatatggtttattcattgaaattctggacagctgtacgtttaaaagaaagtttattttgtatgtgtgtctaggctctgatttttggtaaattgtaaaggaacaactgaagaactggttgctggggatgtcttcagtagtcaggagtacccaaggataacaccagccacaccgctgtatatgcatgattctgaacagttagccgcctgttattttactgtgtatatttgactttaaatatattaactttttgtggattcatttaaagtctgctcatatgcagcactgtcaaaaccactaaactgtatttgagaacttgtgctgtaggttagaataaagttgttacttgggttgactccattgtctggagcatatggctgagagtaatgctgggtgtttgagtgcttgagcgaatcacacatttgtaatttgtgtagtagtcttccaaaaaatcagtatgcagagggaaacaaactggccctttcatttttaactttctctctctctctctctctctctctctctctctctctctctctctctctctctctctctctctctctctctctctctctctctctcctgacttgagctaactcaagcttcattctggttacagggagtgttgatgtgacatgtaatctcagctcatttaggaaactggtccaggagggtttcagtgagtttgagactaacatggtctacacagtcccagctaagtagggagagattctatcagatagatagatagatagatagatagatagatagatagatagatagatagatagatagatagatagatagatagatgaatctgattttgtgtgtgtgtgtgtgtgtgtgtgtgtgtgtgtgtgtgtgtgtgtgtgtgtacataactaaacaacagtagtcacttttaaaaggccaagccccacagtttgaagagatcactccatgcctgcctgcagctctctcggataaagaaaagactgtctgtgctgaggtctaagtgtagcccccggtttatagtcccagccagcacctggctcctccacgctcttggccacgtatgctattgaactaaatcacttgatgtgaaacttccccttaaaggttataaaaagcccagttttccgttgttcggagattggtctagagacttccctgggatttgttcaaggaagagctctgaagattgctctctgaagaggctcttctggccttctaccacccccctctcatggcagtacactcctgagtgctccctctctcggtctctctagatctctcctcattttcagtcatagtgaagcccctctccaggtttaaaaggaagctgcgcctttcctttaagacccctgtcactgttcactcttcaggatatgtgtatatgtgtgtgtatacacacgcgtatacatgtatatgtgtatatatgtatgtatatgtatacacacacattgacagagatccctctgcctcctgagtgctgggattaaaggtgtgcaccaccaccacccagacttttccagtatattataacatcttttgtgtgtgtgtgtggttttctgagacagggtttctctgtgtagccctggctgtcctggagctcactctgtagaccaggctggccttgaactcagagatccgcctgcctctgccttccaagtgctgggattaaaggcgtgcgccaccaggcccagccatattataacatctttagtgccatgttcttttcctctcaaggcctgaaggatggatgtgtgtgtgtgtgtgtgtgtgtgtgtgtgtgtgtgtgtgtgtttagatatgtctttacgtgtgtgtgtgtgtgtgtgtgtgtgtacatatatatatgtgtgtgtgtatatgtatatatatgtgtgtgtgtgtgtgtttagatatgtctttaagtgtgtgtgtgtttagatatgtctttacgtgtgtgtgtgtacatatatatatgtgtgtgtgtatatgtatatatatatgtgtgtgtgtgtgtgtgtgtgtttagatatgtctttacgagtgtgtgtgtttagatatgtctttacataggagaacttttgcttatctcaagcaagtactccattgtgggattcagattaaaagcttccatatgcccaatgactagattatacttaacactataaccctaaccacgacttcagtagtagatataactcattcttgactttttttttctgatgctgggggttaaactttgtacctacacgctggacacacattttacctctgaactactcccttgacctctctctgtagtttgggcagtaagagagatgactgcttcattctaaatggaggaagggatctaggtccgcccgactccacagcctcacttttgtggtgaaccactgcattagactagagtcagcaaaatcaaaggacttgaactggacattcaccaagcatggacacgagaaagaaaacaatgttcatatggcaaagagccttcgtaaggatcaaacaatctttccatagaactttgaagtcttatttccaggagttttctgttctctagttccaggattctatcatgtatttctagagtgcccacccacctggtgatgcccccttaatgtctcccatcaacattgtctttaaagactaggtctttcaaatgaacaaccaccagtccacccgccctcggtttctctcaccacccttccctacaaccagtcttcaaggctgtaatctgtgccttcttcatccctccacaatggggttcctcacctctctccccaactacaaggctctagcaaaccctcagagcaatgctgccaccctcgtatctctacccaggctgaagcatctttgaacaaattcagcccccaccctgcctccagcatccttttcctaacataagacctgcacatgactgctgtgcttagaactcccattgctaggcccagagatgcctgttcagtgcctccgtctgaactcttctcacaaagatgctgtctgaccttgcctcttttaatgaagcccaggacaaccctgcagctggtaactttggcaacctcacaacccaatgcctgtgcccacttgttgctttagagtctgctgcagctaggcgtgagttgtacttaccgaaaccctgcttaatcggacagcatgctcagtcccacctgcctcgggatgcacacaggtgcctggcatggttagatgtcttcctgtgtaagacaacagctttggcatccctccacagcttgtcacatattgatggtgtttgctatctcctggtttctcgtcctgagaaggaagtctgtcaaaaaagaagtgagtctcgctctacctctgttcttagcttctagtgtcaagccgggctcaaggggagagtttgttgggtgaaagagagttcccaggagatacggtgttatttagatctcagaggtaggcttctctggaatggttggaacccgactttgagtttcagaaagcttgtataagccacaaggaaattggggaactggaatgtgaacgttagacactatcctaagtaaagaaaagcaacacttgtttatcaatgctttcataaaacccagcaacagtttatgagcttggaaaatgattcctgccttccttatttccctgtggcccttccttcttttctgacttaataataaaatgaacagaatcagcacttggttctgcgtccctggagccttaatgcagattattctgaaaagcagtaactctaaaattacttattgatattatataatatatttttatccccacatcatgcaagtgtatggttctagaaaaaatatacaaaaaatttaaatgcctgagtttactcatttgaatactcatatacgactagtccatcttcttttcccatatttataggatatgatttctgggttctttttttaatatttatttattttatgtatatgaatacactgtagctgtcttcagacccaccagaagagggcatcagatcctattacagatggttgtgagccaccatgtggttgctgggaattgaactcaggatttctagaaaaagagccagtgctcttaaccactgaaccacttctccagtcctggcttttgttttatgcagctgtctatcccatacataaaaattgtaggggctggagagctggctcggtgtttaagagcacatgtggctcttgcagaaccctgtcactccagctccaggggaacccaatgccttcggcttcggcaggtaccttcttcattcatgggccagagacatagatacacatacacagaattaaacattgcaataagaacaaatcctttaaaaaaaacatttacatggcactgcattttccacactttctttccatacaggtttaaaaatattatatagctctccgccggtaagatagcacagcaggtcatggcatttgctgccaagcctggccgcctgagttccattgctaagacctacacaatgcaagtagaaacacagctcctcaaaattctcctctgacctccatgtgtatattgtaacacatgtttaacacacacacacacacacacacacacacacacacacacacgcttaacatcattttagtcagcagaatattcttttctttttgctgccatgctgggattttaaacagagatctcctgcatgctgagaaacagagccagaattttcagtgtctctaccatttttccagaagtgaacattttgctcgtttcagaatttttaggtttccttttcaatattttatcattatgaacagtgatgcaaggaacttaaagcactacttgtatttatgacttgagtttaaaggcagtaagcaactatgtttattttatgtgcatgagtgtgtagtcggcatgtatgtctggataccacatttgtacggtgccaagggaggccagaagaatgttagattctcctggagcagaagtttggacagtgagccagtatatgggtgctgggaggagaacctgggtcctctgaaaaagtggccagggctctcatccactgagccatctctccagcctctcagtgtttgttatatggcaaatactgttgtggtctaccttagttatccccttcagtcaattaaaaatcgttagtttatcttgtccccatcttacacaggaggaagtaaacgtggagtgtgacaatttgcccttagtacatgttgatgcctgggagccaggaagcctagagtcagattagcctctaggttaacgtttcactcatgggcttgccaacaggaagatattttacagatatggtttgctccctatctccctactctctctctctctctctctctctctctctctctctctctctctctctctctctgtgtgtgtgtgtgtgtgtgtgtgtgtgtgtgtgtgtgtgtgtgtgtgtgtgtgtgtttggtgtctttgggtcacagctcctgtcaaatacccgattagatggaaagaggactgggaataactctgagcccaaagaagtgacttccccctctgatgaagcaaactgaattccccctaaggacctgggctttagtgtttttagttgaacaaggctaggattactgctttcccgtctttctaccgttcttgctattttaaatagacagtgccagtatgttctcacactctgtgccattcccacctacatgcctgcagtgtaccagtggtggtagttttccaagaaataccgccaccatgcactctggttgctttgcacgggagtcagactactctgtctgcagccagaagacgttaagtcagaatagtctgagtaggttaaggagtttggaagactcggctttggagtcttaacactatctccaaggggagggtgctgttctagagcatcctagatatacctagatgatttcaaccaaggaaaaggtcaggcccagtttctatcacaagtatatggttctcttaagcttgtgttagtgttttctgaatcccattgatgaatgagatatcagggtagcatagaatcagagcaaattggctgggttagcttaggcaagttacactgaacttcagtccctggctgttaaaggggtttatctgcttctctcagctcagtcataagggggaaaatacattacatcctgggctattgttggcactagataaaatattcaaatgcttcctcgccatatggccaagcttttgcaatgatagctagagcccacctggggagattttccatgcagaaggagccttcaggaacactttttacaatgtttgtgcttttttttttttttaactcttaaaaataaccgtggggtctggagagatggcttatcagttaagtaagtttgctgctctcgcagaggaccagagttcagttcccaacatccatgtctgatgcctcctcggaactgtctttaacttcacgtctcctggatcctcttctgggctccatgggcaccctcatgcacatgggtgcacatgcaaacttctcttttaatggttcatgccttctaaagatttttgcgtggttttaaaaaaaaatcagttgttctttaaatattcagcatttctccaggcaagagcctgtgcattcacagagggagctaagtgagttatcttgcacccaggtgggtttgtatgcttagtaacatatccggccctcagtaaaatctgttgctacttgagcttgcctcgtggggactcacagactggtggttccctaagggagtgcctcccaactgtagtgctgtaatgaatggccttactttgtctctctcccggtgataaatctcaggttcattagacagatgtttattgagtgtcaactgtgagctaaagacttgtcaagacattgggatgctagaatgatagtgaaaggccaggatccatcctgatgcagctacatccttcctccactttgcagtctgtattgggtgatgcgcgagcttttggcagtctgtttgtagacaccacgtgagcagccgttaaacaaaacaatataggcaaagagaaatcctgacttacctagagcttcaatgtaagggccttcctttgtgccacacatttgcttatctactaggctgagtccaaatggccagtgtgaaaatccgaccctacttttgagcaacccaaaacaggatgcaagatgaattctgccttcaaacgaataaccttcacaagtcactgactcgacctctacttgagctccactcttgttcgtcaggaagctctgggtggagggttgatttcccctggcaagagatgatgtctgagaaacacccaccagggctgagatgttgtccttgcttctgggatgcctaaaatctctctattttccacaccattcctgagtgtcatcctggtagtcctggctgggaatatgtccttaataaggtaagtctttgctgcacagctccttcagtctcctggggaggacaggagaacaaatgagcaattacaatgcagtgtttatactgggggttattgtcagaggagcgagtgattaatttgcccgaggagtcagaagttttccctgaagatgcgccatctcagctgagccttgaaccctgatggaggcattggcaaggagacgtggacaaggaggtgtggaggttgggggatgggcagcgtgagtgtgcagggtcagggttggggagcaacatgagggggcatttggaagaaggaacactgctgggatgtctggaaggagagacagtaatagcggctaatactgattaagctcccactatgagtctggcccattcttcatgtttctcatacatatggactcatctattttgagagcaaggatggtgatcttgaaagcacatgcattcttttccagccaagtgaatttctttggtctggatatttctgaatccttttgccttttagctaccctctatgatcatgaacctccataaaacttttatgagagaaaaatattttatggtccatctgagttaatgcctgtgttgaaattgtaacacacacacacacacacacacacacacacacacacacacacacacacacgcaccagcatggtaaaataggtcattggtcattcatcattgggagttatgctttactactgacatatgtatttgagtaatcaagatctgagggctggagagatggctcagtggttaagagcactgactgctcttccagaggtcctgagttcaaatcccagcaaccatatgctagctcacaaccatctgtaataagattggatgccttcttctggagtgtctgaaaacagctacagtgtacttacatataataaataaataaatctttaaaaacaaaaaagaaagaaagaaagaaagaaagaaagaaagaaagaaagaaagaaagaaagaaagaaagaaagaaagaaagaaaagaaaaggagtttgagccaggtgccaagggagttaggtcatcctactggttattcggactccagaaagggaaaaaaaagatctgaaggagtttataagaggcttcaaccagtcattaaattcattcaactaggggagcccttcctatgtgctgcacgcttttccaggtgtctgcctgaaggcagaaagcaaaacagacaagatgctgtatcatgggtatagacgggaggaaacagaaacacacagtgtgtctggtggtgatgaactctctggggaagcactggtcaggagggagtcatcaggaatgctgagatggagtgatacacccacagataagggaaggcctgctggagaaggggctgtaggagcaaaaggccctggccaccccgaagcctgctggggaagcctccaggcagagaccacaggaagtgtgaaagcctcagctggagaaactttgacttaagtactgtggaggagacaatgaagtcaggggagggacaaaggccttgaaccaggctgagtcaggctcttcctgaccagttcctgacctcctgggtcatcttcataaacttccccactgaatagtgggttgagttctttgtccccactctctcagccaccagtgagaatctgcctgccctccatgtttcttcttagtaattttccatccggagatttcccaccgccccttctgggctagaaatcaccactcatccttgctttcagagttcatccttacagtctcactggataaaccctgtcctgccatccttgagaaatgccatgagttatttttccattaatagtggctctgaatgacagactacacagggccacagaaggcccagaggcacatgcaatggcataattattattggtgacatttcttgtagagtcttccatgtttcgggtattataattatctcggcacctctattccaaatactaaatggagacctggatcctaaagggtggaagatctgtggacaaaacccttagtctcagctcagttcttactaaaacgccatcagtctcacagagtagaactaacactataaagatgttagctctaaaatgatagtcttgttttttttttttaatttttgtgtgtggtgtgtggatgtgtacatgttgataaatgtacatgtatgtgtagatatgtgtatgcatgtgtgcatatgcgttcagtatagaggtgggaggttgatgacatcacatgtcttcctctgttgtcctctgctttttcattctcactgagcagagagctcatcaattcagctggactggctagcctgtgaccttagttttccactggtctccacctctccaagccggggttatagttgtacaccccgtgcacccagattttcatgtgggtgctcagaatctgatctcaaatccttatgcttgtggggaaaaacttcactgactgagccatcttttcacatccccccctaaaactgatgatactaaagataaaggtgagccagtaaatccccaagagccctaaagagcgatctctcagggaagtggagaaagactagggatggatttgccatttcagaggaggaagcttcgatgccagcaaaaggaggcggatacctcctccctactctgtttctccctgctccaccctagctgtcctctgctcctttgcaagatagaatctctgtagaggatggcacctccctgccacaggttgctgtggctgcattcctctctgggtgtctctctgacagagataaacggcctacatccagccattcttgtttttagtgttcttgagtcagtgagagtcaaaggctcctcgaagccttgcttaggcaattgtagactggagggaaaacagaggagtgggtaacttagcatgctgaggctttattacttcctcttgatggggagagaaggttaggtcacctgcttcaagaactgtggcgtagttatttacatgaagtgtctagcataggacctgacaatcaatatgtgctaagttctgtttcctcttgtttttcatcagaggtgctctgacagc

SEQ ID NO: 3458 - DNA, 2379 bp, Mus musculus
gcgcctgctctggcccgggccctgtgctgaccgacccccggtgtggcccactccggccctgcccagttgcgtggctcccgcctggcacgccagcggcctcggagcagctcaagcccatgaggccggcgcgccctgccgccggtgcaaaagagacggagctcccggcccccgcggtggagcggtggatcaatgcggttcaggaatcgattccagcgagaacagtggagcattgtttccacatgtgcgatcggatggtcatctacttcttcattgctgcttcctacgccccatggttaaatctccgtgaacttggacccctggcatctcatatgcgttggtttatctggctcatggcagctggaggaaccatttatgtatttctctaccatgaaaagtataaagtggttgaacttttcttctatctcacgatgggattttctccagccttggtggtgacatcaatgaataacactgacggacttcaggagctcgcctgtgggggattgatttactgcttgggagttgtgttcttcaagagcgatggcatcattccgttcgcccatgccatctggcacctgtttgtggccacggcagctgccgtacactactatgccatttggaaatacctgtaccgaagtcccacagactttattcggcatttatgaccagtctgtgctaggttttcaaatcagtattatcacgatggaggcacttgggtggggggaggggcggggggagaactgaatgtcgcacacagaagaagagtgagcaaacttgcactgacttcgttttaatttttttttaatataattactgtgaaagtataaaagctgtgtctcggagttttcctcttcacaggcaacagatgaggtagtgaatcaattcttcattccattccactatcatgaaggactcgggagagacttggccaactgatgtttacaaaccagaaatttttgtatttttcttttacagattttaactacgatgatttttttctaaattaagtaggtcaggttgtcaaagtcagtgcaatagtaatacaacttcctttttaagaaaacccaaagttgtttctatcacgtttcccgttcactgtgtaaaagaatcatggaaactgaacactactttttaccatgtttcatcttgacataacatggttattttttaaaaaggaggctttagttcttttgtaaatttttaaagaaacgattccattgacgcacacccccactggctcctcatccatgcgaggtttttgcagcaaacggtcaacattccacgaacaaacattatacctcttctggcagttttattaagtgtggagaacttgccaattttttagaaacactgcagttttttccaaccttttctgccaatctctaaccctgaactcagtgctgctttgggctgacatccatgactggtgtgggccaccaggagtaagacagtagtgttttgataccatccactttttcagaagacataacttcgctgcatgcctttgccccagtttttctccagggtctctctccacagtcggggaggatcctgtccggattatgatagtattattgggttgcccatctgccatgagctttctgaatcatggcaaattgtatttgccactttggtgcccaacggttcaagtcattgtggttaagccacttaactttattgtatgagtttgatattcattttaattgtgggactagacacataaactcacatttctgccttttcctctgcatttctcaatatattatgtttttctcacgccataaataaaacattgattggcaggttgaagcttgtgtcagttgttgatgggttttatgctgactctgtggagtgatatttatatattatttttagtttcctctcaatgtcttatattaagattgatgtattagttgctttgttggttaatctttcttggtgtttaagagaaatgaagtcaccttgcctttagatcagatgctattataacctgtctgtctaggaacaagctgtcagactaaagatatggtttattcattgaaattctggacagctgtacgtttaaaagaaagtttattttgtatgtgtgtctaggctctgatttttggtaaattgtaaaggaacaactgaagaactggttgctggggatgtcttcagtagtcaggagtacccaaggataacaccagccacaccgctgtatatgcatgattctgaacagttagccgcctgttattttactgtgtatatttgactttaaatatattaactttttgtggattcatttaaagtctgctcatatgcagcactgtcaaaaccactaaactgtatttgagaacttgtgctgtaggttagaataaagttgttacttgggttgactcc

SEQ ID NO: 3459 - protein, 220 aa, Mus musculus
ACSGPGPVLTDPRCGPLRPCPVAWLPPGTPAASEQLKPMRPARPAAGAKETELPAPAVERWINAVQESIPARTVEHCFHMCDRMVIYFFIAASYAPWLNLRELGPLASHMRWFIWLMAAGGTIYVFLYHEKYKVVELFFYLTMGFSPALVVTSMNNTDGLQELACGGLIYCLGVVFFKSDGIIPFAHAIWHLFVATAAAVHYYAIWKYLYRSPTDFIRHL

SEQ ID NO: 3460 - DNA, 49372 bp, Homo sapiens
cagctcactgcagcctcaacctcctgggctcaagtgctcctcctgcctcagcttcccaagtagctgggactacaggcctgggccaccatgcctggctaattcccttcccttcccttccctgccctccccctcccttcccttctgtttttgtaacgacgaggtcttgccatgttttccaggctggtcctgaactcctgggctcaagcagtcctcctgcctcagcctcccaaagtgctgggattactggcatcagctaccacatccagccccaagttaaatttgaactctagataaataatgaataaacaaccaatattgcatggggcagaattatactaaaaaattatttgctgataactgaaattcaaacttaaagggaatcctatatttttatttgctaaatctggcaaccctacccagatgtccaattctgactcttacaacaggtaagagttgtaaatttaaatttgtcatcctcagaatcctccataaaatgaaaaggctgaacaagatgaatcctaaggtttcttgcagttcaataattatgtaattctgtgactcaagtactaatgaactacaaatgtgacactgggcaagttaatttcttggtggatcaatttcctcctcttcaaaataaggatgataaagccaatgtcaaaattattagatgaatagacctggtttatgacttgtcttagataaacaaagctagatattagttaaagaggtgaaagcagattttattcaactactgacagtaaggaaagagttgggctgccttctgatttgtgcaaaggtaactgggcattttaaagggaaaataagggaggaggaagtgtgagcaactgcagctcaggcagagtcagggaaagtgaaaaatgaccaagggttagtcagggtaaatgtgattaggctggctgcatctgctagctggcaattatggaagtcaggattctatcctcccgcagagactgggactcccaggccctattcttcctgattatatttcaaaggaatagttttcaggtccttgagaaagatactcctgagttgtaggagatacgtatacattttaaagcaacagagaaaggactcagaattgtaagccactttgatttcatgtgctaggaaagggaagttaggggcctattgtcaggtgttgatgagaacaaacagtaaatgcttttgacagccttgagattttcctgacaggaactcaaaagggggcagggttttctcagtgatgctgccttccatgctagaaaccattctatgattggtcaagtcttagtgcaggggtatggactgagcggttgttatgagccaatagttatttgcagttctcatcttcaaaagtgcgtggcatagtaacttgtgcttaataattaatctcttgtttattcattcaaaatactataaaatccctcatgatcaagctgtatctaaagaaacttttttgttttgttttgttttgttttgttttgagacggagtctcggtctgttgcccaggctggagtgcagtggtgcgatctcggctcactgcaagctccgcctcccaggttcacgccatcctcttgcctcagcctcccaagtagctgggactgcaggcgcccaccaccacgcccggctaattttgtttttgtatttttagtagagacggggtttctctgtgttagccaggatggtctcgatctcctgaccttgtgatccaccagcctcggcctcccaaagtgctgggattacaggcgtgagccaccgggcccagcctaaggaacatttttttttataacttagttctgtgtgaagaaacggcttttgatgcaaactttaagtgagaaaaaagtataggacacttgcttaacttgctcactttttttatttttttgagacaggatttcactccgtcacccaggctggagtgtagtggtgcgatcacagctcactgcagctttgaacctccagggctcacatgatcctcctgcctcagcctcccaagtagctgagaccacaggtgtgtgccaccatgcctggctatttttttaatttttagtagagatgaggtctcactatgttgctcagactggtctggagctcctgggctcaagtgatcctcttggtttggcctcccagagtgctgggatttcaaatgtgagctaccatgtcttaccacttgcttaaaatattatgagtcttagcaaattgttggtaagcaatgatggtgctgcagtttaaaatgaatgttatttcttcattaaggtatctcttaagacttgtcattgtcaccatttttgttgacacgaagttggtgacctatggactcaaaatacacatctttattctagaatttgtatgttagctttcagcttgccctcccttcagttggtccaaaacaaaaagattcctcagtttctgaataggtgaagttactacactgatttaattatatctgtattgcagcaaatctgagctggatctggggaagagtgtgtgtcctatttttgtttctctttactcattagatttatatttttaaatggtgctaaattgtgaatttaatgcaatgcacacagaagcagtcatgggtggaattttatccctccttggctctaaagagttttcacagatttaggctttgtataaagaacttcttggccaggcacggtggctcacgcctgtaatcccagcactttgggaggccgagatgggcggatcacaaggtcaggagatagagaccatcctggctaacacggtgaaaccccatctctactaaaaatacaaaaaaaattagctgggtgtggtggcaggcgcctgtagtcccagctacttgggaggctgaggcaggagaatagcatgaacccaggaggcagagcttgcagtgagctgagatggcaccactgtactccagcctgggtgacagagcgagactccatctcaaaaaaataaaaaataaaagaaagaaagaaagaaagaatttcttaatctttctcagattatcctttttctccactccattgatgttgccttggttctggccttcattactgcttgcctggatggttatcctctttttttttgttgttgttgttttgttttttgtttgtttgttttgagatggatttttgctcttgttgcccaggctggagtgtagtggtgcaatctcggctctctgcaacctttgcctcccagattcaagtgattctcctgcctcagtctccctagtagctgggattacaggcatgcaccaccacacctggttaatttttttgtatttttagtagatatggagtttcaccagcttggccagactggtctggaactcctgaccgcagatgatccacctgcctcagcctcccaaagtgctgggattacaggcgtgagccaccgcgcccagccgatactcttgttttaaaatggtcactctgcttccagcatccctcacagtatttgttaggctaaactgtatgtaacaaaagccccaagtaagagtggtataaacgagatagaaatgtattcttcttacagatcttctggaggtgggggattttccccactggcatggggaagaaatgctggatagaaacatggggttgtttgagagaaagagatatggtagctgccatatgacagagaactagagagatacagagatgtttaagagttatgtgcaatgcatttcccttctccatattcacaagaaattttagtaacaattgacattacttgtctgtgcttttatagcagcagtccccaacctttttggcaccagggacagaactggttttgtagaagacaatttttccacagatcaggagtcagggatggtttcaggatgaaactgttccaccttggatcatcaggcattagattctcataaggagcgggcaacctaggtccttcacatgctcagttcacaatagggtttgtgctcctgtgagactctaatgtccctgcgtgtgtggttcacaatgaggttcatgctcctgtgagaatctaataccaccgctaatctgacaggaggcagagctcaggtggtaatgctcactcccccacagctcactttctgttgtgcagcctgatccctaacaggccatggaccggtaccggtccacagcctgggggttggggacccttgttttagagactcatttaaatttgtgattcttccagaatcattaaggcaggtactaggacttgcccaaggaggctcagttgcatttagattgcaaatgggtgatgatatctacctggaccctctacagcacctggtgaggtttcagagcagcatctttcagtgtgtgcgagtttagaaatagtcatgggcatttccaccaacatactctgcttttcgcacttcaagagaaattacctttcatctttaccaccaactcttatttatcatgaacaaatagaataactgagaccacacaaagacactaagattctcaaatcttttctgttcacagttgactttggtagaatgaaagaactcacaggctgactattcccaatggcttcttactaccctcacctaagaaagaaagaaacatcaagataagtggctaagtgagcccaaataaggggcatctacattgtgttaaatatgattctttattctctgtggccaaaacaaaagcacagacatgagtttcacacagaccaataggaaagcccctatctaatgtgtcttgtggcctctgcaccacattgtgagaaccattgccatcaacttttgctttatgttggtcttttgaggccttccttgcattcactgacattcccatccttattcttattgcctttcaaacctctgtttgaagaaagagctgaagcaatcctgaccctcaatcctcagcagaatatgtcatgaggcagtcaggggcttacattcaaatgttcttttttgagggaaaacaaccacaacagccaacagaatgtcatttattgattgtgcaatgagaatagaacgctgcttcatgcagtgagtaatgacacataatcatctactgtgacgaggcatgggtggaaaaagccttgagcttggagtcagaaaacctgggctcaaatcttgactttttcactaatacacatttatgttatttgcaaaacctctctaagctttcacttcttcatctataaaacagacatgatattatctatctcacagcatagttttaaggataaaatgagataatcgatgtaaaatttctagaaccatgttaagcattcaaaaaatctgcgtggggtgcggggcaaggggagggagaatattaggacaaatacctaaggcatgcagggcttaaaacctagatgatgggttgataggtgcagcaaaccaccgtgatatgtgtatacctatgtaacaaacctgcatgatctgcacatgtgtcccagaacttaaagtaaaaaaaaaaaaaaaaattaatctgtgcaaacattgtacatcctccttccatgtagtccagttgctaaaagaagtaactttcaaataaatacaaccaaagagccaaaaataatttttagaaaggactcaagccgggcacggtggctcacgcctgtaatcccagcactttgggaggctgaggcgggtggatcaagaggtcaggagatcgagaccatcttggctaacatggtgaaaccccgtctctgctaaaaaatacaaaaaaattagccgggcgtgctggcgggcgcctgtagtcccaactacttgggaggctgaggcaggagaatggcgtgaacccaggaggcagagcttgcagtgagccgagatcgtgccactgcgctccagaccaggagagagagctagactccatctcaaaaaaaaaaaaaaaaaaaaaaaaaaaaaaaaggactcaaaactacttcttggaaaatatgagagtatccaactcagattgttagtaaaacttctcccaacccgtttcctattcttcttcttattattatatctcacaatcctaagaatcctcctattttgctaaatcccaacccacctctcaaaacatcttgaccaatatctcccagagcatggatttcttttcttattcatctttatcagggtgataaatatagaccatctacctaagtccttcgctttttctgtagatctttttttcttcccattgctttatccagttgtttttatcaagcaagtctagcaatggggcatgagagacagaagcactactcaaaggtcagcgactgtgggcagaaaaccaagtaggaaaagacgacattcttcttttcagaaaagaaggaaagactgggagcatcttcattttaaaacttgctttattcggtcatatttgtaaaaacaaaacacaaacaaacaaaaaaacagattgaaagccagttacagaacaccggaggagactggaagttcagtcaagtcttccggaggtgtctggagtcaaagtttggagaaaagctgctactttcagattggatgatcagagctaggggagcaggtcccaggtgcttgcttcctcgtatgaatggcatcctatccaggaactctgtatccctccgtgagcagagcaggtgtttgctctcctaaaactttcctctggcatctgttctattgcacctggagttagctctatcacaaattccttcttataggcacaggcgatgcccatgcaaatatacatctgcagttttgcagaaagaagaactgtaactctgagctcaacaaaaatgtcacattctgctaatgcaaaacattttccattgtcttcagctctcacaacactaatctctaaatcaaattgagtacctctttgctgcaatcatacttgggattgctcctcagaaacagattcactaaacacctcactaaaaaaaatgtggcaggtgtttacatgattcatttaaacctgtttcttgtgttttctttttatcttttgtggcttgcttttaccttgggggggtaggtttcaggaaagatgaggttaatttaaaattgcgaccatatttgtttaagtcacctttagttgatagtccagcatttctgtggaagagaccactgtaggtcaaagtgttttatttcatctgatttaatctgactttttatctcattcatttctttttccttgggtaagtatcattctcactgatgtttccaaacttaggtagcctctcaaaagttttccttataccaaccacttctcttccttgttcaagctgttctcccagtgggaaagtttgtgctaagtgataccatccagcatctcaatcaaaatccatctgcagacttccttctctctggcacctcttcctcattatgctcatcatactcagttcacttcttatctctgcacattcctacatcactaataagatgtgatctggcatctgttggctcattgtgttgttgtcgttttgttattttttaattaagttcatatgaataactttattgagcacctactgtgtgtcagtttctgttaaaagtatccaagaaatacaaacatgaataagacgatctctgtgctccagatatttctatttcaacctttttacagaaactaaaatttttcaaaatcttttaacaactttattaagatagaattcctatgccatacaatttacccacttaaagtgtagagttcagtggcttttatatattcacagaattgtacgtccattatcacaatttgagaaaattttcattagaccccaaaagaaccattgtaccgcttagccatcacttctcaatcccctcccattcccctgccctaggcaaccactaatctactttctgtctttatagatttgcctgttctgggacatataaatggaattttgtatgaatggaatcatacaatctgcagttctttgtgactggtttctttcatttaacatagtgtttccaaggttcatccatgttgtaacatatatcagcactgcctttctttccttccttccttcttttttttttttttttgacaggatctcactctgtggcccaggttcaagtgatcctcccatctcaacctcccaagtagctgggactacaggtgcctaccacaacacctggctaattttgttgttgttgttgttagagatgaactcttgctttggtgctcaggctagtttcaatctccaggcttcaagcgatcctcccacctagacctcccgaagtgttgggattacaggtgcaaaccactgtgcctggccctttaaaaaaaaaaaaaaaaaagacttttttttttccagagaagttttaggatcactcaaaaattgagagtaaagtacagggatttcccacacatacatagcctctcctgttatcaaaatcccccaacagtgtggtacatctgttacaattgagcttccttgttttattttttaacccttcttatgttattacacatggctatttttcatctatctttattagctatctcctttgttaccttcccctcccgcactgatgttttagcccagtggcccaacatagctgataagaagcagactttcattccaggttcattttcccgatttagtgttgagggtgcgggtagatgaagttttgttttgtttgttttgttttagagaagtgtattgctttaaaacagggagagatagtctgacgtactgaaaggaggtgggtctttaaagttagcgaaaggtaggtaggagccttacttttgcctttggcaagtttattgaccactataagcctcagccttatctgtaaaataagttggataatgcccatctggaggagctcttgggaagattgaagcatggaaagcacctctctggaaggttcaaggaaagggaactagaattatgggtgacagaattccctggctttccaatgctttactgtaggtcgaatgagcactcctagcaggctggcctcatgccacttcagagtctctagcctgcaggctgggggctgggtatggacacgatacctggaagggaacacatataacttccatcagtgatcctggaaaggctcgacaaatcacccattcattcattctgtgtgtatgtgtgtgtgtgtgtgtgagagagagagagagagacagagtctcactctgtcacccaggctggaatgcagtggtgcaatctcggctcactgcaacctctatctcccaagttcaagtgattctcccatctcagccccccgagtagctgggattacaggagcccgccaccactcccggctaatttttgtatttttagtagagacaaggtttcaccaagttggccaggctggtctcgaactcctgacctcaggtgatccgcccaccttggcttcccaaagtgctgggattacaggcatgaaccacagcacctggcccattcattcatttttatttgaacttctcttccaggaagccctctgagtttaggtttagcgacaggaccctgattcaagtcaactcgtttatttgaaagctgcctggataaaaataaaataaaataaaaaataaactggaggataacataaaaggatccttgcagaggattcctccttttgtggatctcactgaatctcagagttagaagacgctcagagatctcaactccctcaagggtcagacaaggacaggtttttcattctgccctggatcctctcacaatagcctcgcgggagctggccctcaaaatgatgaaggaataaatgaaaggagggatggagaaattaatgatgaagaaaaaatgaatgaggtagggctgcttgtttgctgctattttcttcacaatgcttttaagatttcctggtccatctcctccttcaccacttctctccctccctcgatctcttctccaacttgtctcttacagaagggcgccgcgttcccgcgctcctccccttcccctcgccccgcccctccccagcgaggccccgcctcgccgcccgagcccggcgggaatgaatggcagcgtagccgccgcgccgctcggggtgccgattggctgaccggcgcgctgacgcgccggcgaccgcgggtgcacgcaggcgaacagagccggcgggggcggagccgggctccggggcggggcgcaggagccccggggcggaggagccggggaggcgggaggcgggaggcgggaggtgttggggccgttgaagcggcctccctcccgcccccagccgcccggtctggccccagccctgtcccgacccccggcctggcccactccgaccctacccggccgaagggttccgctggacacgcaggcggcctccggagcagcccaagcccatgagggccgcgcgcccggccgccggtgctgacgagacggagctcctggcccccgaggaggagcagaggatcaatgcggttcaagaatcgattccagcggtgagagggatggcgtcccggtcccgctgcccgtgtcagaagcgggttcccaaatcccgccgttaagcgcacggctcccggctcctcacctggattcatcctgggtggatcccgcaccttggccagggatcagttccctggggattccccaccctgctgtccctgggcgatccccttcctccaaggatgggagctcctgcctcacccgggtctcccctcgcgatctgcggacctcagatggattcccggccccgggactccaagcctgtcctccttcccggggatccctttgctcctggggctcaccctcccgacccccatacaggctgggctctggctctctctgggaacccgaaccccagccccgggcaccgcccccgagtcctccgacctggctttggcctccatccctttacctccagggtgggggtctcccggggcgcgcggaacggggtggcgccctgcggagagatttgtcgtaaagcggggtgctaggcattttgggtgctttgtgaacggccctagcaacagggaaactgaggcacgctccgccagcttagccctgcctggccgtgtaggggccttgctggttctccagctgaacgtcccagggcggtgctatttttgggctctgcgaaggggcatgttagctttcgggtggcgagacctgctgtggaggcgccggtgttaggaaacgaggaggaggaaccgtggaggcgccaccggaaggctggccgactgctcattcactgtagagctggtggaaatgccgggctggggggcgccgtggccttactcccctctggggctccaccgtctaacaatggatggaggttagcccatgactctgagaggaactccgggcttttcttttctgtttaagtgggtgaaagttcacctctccagggcatatggtaactgcatccctttgtgtgaattcccggaccttcaccaccagcatgtttgctgggggtgcagtgacaggggaaattttaagaaatgcatgaaatcttccaagaaggttgttgagtttttagacactaccttttatttcagaattttaaagtacacattttttttttctttccaatctccatgccctcactgccctctcacccatctcattcctcccccagtcccaaagggtaaaggaggcaacaaatgcacagaagagttgccatggtctgggccaccaggaaggggatcagcttgaagacttggattgacttctgaatatattgcttatcagtcagggtgttgaatgcctggcactgttcccccagtggaacttcataccggtgtgtctaagggcaaaatggaaccgtagtgttctgactttagaacctgatgtcagaaatgaagaccggaggggcttttagagagaatgtaacatgcactccagtcatgatcagtgaagccctgtgcatgcggtttgatttggttttacttctctacacgtctgtgctcttcctgttttcagagaacagtggcaatattctgtgaaattgccccttccttgtttgattaagagtttgtcattcttacctatacctttggatcctctaaaaagaaaaaaaacaaacaaaccctgttcaattatttgttgcacaaacgttaaaactgttaaaacaacaacaacaacaacttcatttaggatgctaccctctcagcttattgaactgactttttaattatttttgctggacactgatctctccattccttattagcacagttgtaatgtgatttttgcgctattattcacttaaaaactaaaaatacaggtattttcttttggtgtggcatagactgtaattttcttgggggcttgtgtgtttctcaatggatatttaacagtttctttcttgatgacatctagatctaccctgattttctttgaagatttgtgtgatctcataatttcttggttttctatcataagctaggttggaaacatagttctaagcatcaattttaacttggaaataaagcctataaacaaaaagtaatgtaatgagaatgtcctgatttttgtggttcacacattaaaatgctgagagtagtactattctgcatcttttaatgctgtgttcatgatatatctttctgagcattcccaggtaggtaaattgcaaaggaactggagggagagacacactgtctttgaagggagacatgcttcctccctcctgatagatttattgggactggatggaggagcatgaggagggtttatgcaatgatggcttcttaacaaacttaggatgtgaaaaatttcactggaacacagaggcatattttatcttcctcattttatgtttcacacttgagtatccccaagatacctacacacacatagacaaacacaaagtcatcctctccccttcatagcatctctgattgatggcaataactgctaatatttattgagtgccatttatctatgccaggcactggctgggcacttgtatattactcatcctcaactataactctggaagacataaatgttatacccatttaatagaagagtaaataggtttagagaatgaaagggaacttgcccatagtcacacagctaggaaggggtagacccaagagttcaacttcatgtctgtctctcaaccagtcatgctgctagctcacctctttctctctcttaactctctgcccacaccacatctgtgtgtgggcacacagatcttataggcataagatccacagagctctactgtatcttcttgttggtgtgtactcatttcaacagtcttgcaaccaaaaatccaaggaaaaagaagcccttttcctcagccccaacctcatgatcatgcagctagcttcaaaactggatatgtgggaaagcattttaatctacagtattagaagtcttacagggctacctattgtcttttttcccatgttcttaaagcactaaatcataggcatggggtagtctccttatatatgccatcttcctttatttaataattaagtcaagattggcactattgacagtagacacttttcctgaacaaatatgctcagtcataaaggggagctaatagtaagaggggtccacttatacgttgcaacataaatgatgttgaaggggcccttggaatatccgttgtcttggattttaagtgtttttgtgtgtgtgtgagattcggggttctcttggttccaaggctgcctgtttctcttacttacagaacctgctgtgtccacagtaaaactaattgactatgggatatctttgttaagacaaaatagttcagcagtagctggaatgtctttctattcattcaacaattattaagctctagcaataagctgggcattgtacttcagtttggtaatggaaaggtgaacaagacagccttcatggaattcacactacagtgggaaaagatgaaataaaaaataagctaaaacaaatcaaagtcttaccaattgtgacatagggctctggttggatggggagggttgaaatgatacttcagttaggatagtctggaaaacctctcttgaggaggtgacatctgagctgagctgaaaggatgagaagagagctgagcattctggagaatatcctagacagaagtaaacagcaagtacacatgcccagaggcagacacaaccttgatgtgtttaaggagcagaaaggaggtggtatagccagaggatggagagagagaaagatgccaccctgagactggaggggtagtgaggcccagaccactcagggcttgtgggcctctgaacactgtgttacagtgctatcgtaagcactttgggaagccagaggcagactttaagctgggattggggtgtgtgatgtgatctgggttttttgttgttgtttgtttttgagacagggtcttgttctgtcacccagactggagtgcagtggtgccatcacaactcactgttgcagccttgacctccgaggctcaagcagtccttctacctcagtcagaagtagctggggctacaggcatacactaccacacctggctaatttttacatttttttgtgtgtgtagagatgggatctcactataccgcctaggctggtcttaaactcttgggctcaagcaacctcccgcctcagctccccaaaagtgctgggattacaggtgtgagccaccatgcccagcccctcatctgtttctaatggaaaactgtagctgctatgtaaagaagagagtctgtactgggtcaagcaggaagactagttaagagactttgtatttgtacagacctgagatgttaggtctttatttaaggtaggagacgcggagctgggattacaggtgcacaccaccacaccaggctaatttttgtatttttgtagagatggagtttctctatgttggccaggctggtcttgaactcctgacctcaagtgatgaggtggacttatttgaaatatattttgaaggtagtgttgatggtacttgcactcggagaatgaggaacacttgtgggatttgatctactgagatcagcctctgagatctgctggtgggttgcagatctactcagtgggcacagtgctttaggttgaatttaaagtgtgttagtgtgctaaggagtgttcccaggtctctgatctgttctttccctccatggttttgaaattctgtcatggcatgggagaggggtatgggggaaggaggaggtgataagaacgttgggcaagggggaaggcaggagagttttgaaagagaaagtgaaggaatgagtaaaaaaactctgcctaactagtagctttattaagtgcagctcccactcccaggactgaatcaccttccttcaaaccctctagagcttgttggttactcaagcattgagtaaccattagggccactccgctttaaatagagatgtcttccataaatggatgctgttttccataaccagcacttgaacctttcccattcttttttcggggaagagatgaaggccagagtgtgggagttgatttacattttacatctgcttttccatttaggttttaggagtgatttcttcaggaggctgtggaggaggcttgattgcaccctggcaggttagagagaaatgggaaaattgtattgtactttcccagcagaacaattatgctgtctatcctactgagccccagatttagagaattgcttccaggatagttacccttatctttccctattgcccgtgtcttaccctgtgcatcaggatagagtgccttaagtcaccatgggtgggatatttttctgtataactttctacttttattttttaatgtgaattattccaggtgatcagggactaagctgtcacaaacatggccatccagtttatttgtttttaggagaaaatgtgaaagtctatccctgttgctgggtaatggcttgactatttttagattgggctgccagagatataaattgctattttagtctgcagcctggtggtgggtagacaaatcctacttactgcaccctacacagagcacattcaatttcatctaactacagccatcttggggccttgctctttagccttgaaaattcctaatagggtatgctacttatagctctgttgttatgtctcaggacaatgatgtggtatatcctccaattcttgggacacttttaaagcattcttcccaagagtgtaattattttcttttttgctaataagagctgtatagcaacactcttgtctcttaggaaattagtaaaattatttaaaatattatcaggggagaaaagatgatgcttaataatagttaactatatttgagaatagcttggataaattttgaagctactaactgtatatttctctttaacagttggttttcaaaccatctggtagattatactcagtaagtacatattttgtacactagttaaatatcttaacccatcagtgggccaagtgaaatatcttcactgtcccaaattcattccccagtggattttccacctgaactatctgtattgtgttaatagtggctgccactttatttttatttatttgatctaacgataacaggctcttcctaactcagggaaagagtattggctggtcttttattaataaacttggcactctctaaaatggcttggtcatgcgttttagccaatttttggcaacttggttctaccatttggttcagccctgtaccattttttattttgtgtatgaataaggtaatgagtagttagaactcattagtggcacaaaataccaacccccaacccccattcacacttctttaaactagcttgagcaaaaggattatttattgtgcaaagcctgttgacgtcttacagactcttaagcacaggagtgcagtggacctctgcaacctgaatgctgttgaaatttttttttttttttacgtccgtctgtttctgtgcatctacctctttcttcttttattcagacagctgcttttttctctcctgagaaaaaaaggattaattagactaatccagagtccctcatgaaacctgttgtgggtatgggttgggtttttggtggggagggcatcctcactcagcatactgaaatggaagaatgctatcctctctttaggttctgtggtattcatgcttttctctgtactactgatggtcacaaagttagcctaaagggaagtgcggaatatgggcatatgtctatatatgtaacagattttgatatttagatacgtacacacatttgtgtgtatatatgaattttatagccaaaagaatcaggtagtagtcatgtgtttggtttttgaagcagactttttgatttcaggaagaacaaaggtgaaaacatacctccggttttaagttgcctagaggtagccaggtgtcatttatttaagctgtctggtaatacaatatagggaaactagtgggacaggcctgttaatcatgggatgtagggtttaaagatgtgcctatataaagctttataaattttaagagagaaaatagaaactttgtttttcaaatgtagtgtatcccttttcactaaatgacaataaaatttagaaaaattcgttttttttttctagttgtaccgtgtgtgtgtgtgtgtgtgtgtgtgtgtgtgtgtgtgtgaatggaggaggagggttccagttgaaggggtggatatggtttctctttgcttttggttgtagaagtttgcttttggttatggaaggtttttcttttgaataaactgaaagaaggcttaatctaataaactagggtatttgcttaaggatcattgctattggctcagtttactcctctttagtggctttggctttattaccgcaactgggtatttccaccagtcacttctttgcgtagaatagaccacatacccactggtgggtttcctcattgttcttcacacactttgagtttttcttacatgtgttctttttgtttttacaggttcatgaaccatcgagctccagccaatggccgctacaagccaacttgctatgaacatgctgctaactgttacacacacgcagtgagtacaagttttccaccattgccatcctttccacggggctttggtgggaggaaggggtagttatctctagtaacctcagcacaattagttggatttacccatctgtgaccttatctaccaggaaatcagttctgggtcgtgtcaccagaaactatgtaagcatgtagaatgctttgtgtgttctaacctacagtcagctctgtcctggattcgctttctccaacaagatattctttaaaggaataataatagtatgtaccctagttatagaaaaaccaaagacacctatttatgaagactgtcacccctagaatgaaatgaatcgccttttcaagacaatcaactgtgttcatttggcaaagagagttcacagtttgttgaaaaagatgctttttaaaattaagtgatcctctgaaatggggaggggagccatagcctcccactcctacagtggccattgcttcccagaggagatgttattccatattggtgaagaaaaagccgatgtgatccctaaattttttgttaatttttttctgctttgtaaaagcaaaacatgcttattataagaaactttaaaaatactgaaaaatatataagaaaaacaaaactaaccagaaataaactgttaacacttcggtgcatttctttgtgtgtgtgtttgtgtgtatgtgtgtgtgtatatgtgtgtctctgtgttgggggtgtttgtgaatatgtatgtattttcagttttcctgttaatgtgacattaatggcatttcttatgtcattataaattttttactttacctgtggtttcattattcccttgcatttagtgacattgagggaaaaatagtggctgggatacagtctgaaaacaagaaatagagaaaagaccagtttgcttctttaacaatgagtgtttggaacaggctagtttaactgtggtagtcactgttggtacaatacaatggttcagatattgaaacacacagcttacctttaggaataatatttactcggatgaacctgaataaaccttaacttgtctcttctgagtgtgtcacaggttaaggaacacttgtgtaaacttaagtaaagggagacctgacaaaacccccatattaatttttttagaacagaaaatataatcttattaaaccgtatcttgaatttttggatttcagggaccagtaatatttctaacacagacaaaacacccctattgtcatcatttcattgaagagaagatactttaacatgaaaagtagtaaggacatgatctcaagataaagggcattcctttaaatgaaatacattttgttttatgaaaaactttattgtacttaaatgtacttaaatcctctgaaataggaaggcgagccatagactctcacccctacagtggccattgcttcccggaggagatgcaattgtatttaatgttctaattttgcttgggccaacgaaaacttcagcatctgaaaaactcatgccagtctcatctaggggatttaatagtctgttgcaaggtgacaaatgtaggtttggggagaaaaaagataagcaaattgctaacatttgtattctttgtcaagtatgcttactctaatatctaataaagtagtttattctcctgggagcttctgtcattgtaagatgtttactagtcatagtcatacacatatgactagacattaaagtttgtgaccatgtggactatgaaatatgatgcagaaagcaaatctctctaaaattctcaagattttttgaataggtgggccttggaaatggtttgctcttgcttacttaaaaggctctgttaaaaatgaagtgaccccaaaactcttacattctgcagtagctctcaaattggtggaatgtacagatccaaactgaaaatcagggtatataacttcaacaactgactttttgtatgtgtgtgttgctatgtacattataatacctattacttgatttgttcaattatcctgtcctgaaatattgagatttcaattgcaataggacagatattttaaaatgaggacctccctgaaaaatctgagtatatgcttggctgttttttgaaatggggtctcactctgcctcccaggttggagttcagtggtacaatcatggctcactgtagcctcaacctttcaggcccaagcagtcttcccacctcagcctgccaaatagctgggactacaggtgtttgccaccatgcctggcgaattttttaaatttttgtagatacagagtcttgctgtgttgcccaggctggtctggaactccagggctcaagcgattctcctgcctcagcctcccaaagtgctgggattacagtcatgagctaccacaccctgcctgcttggcatttgaatattttaagtaattactctaaatcagattataaagtagaatgaaacatgtccttatttaatgaaattaggataaaaaaaaaaaaccatctgttttgcaacagctgaatgatgttgcatccttgatggcttaattgtatccccactggttggcacaattcctggaccctgagtggtattacctgctttccagtgtagcagctaacttcatctggctctcgttatgattatccaggagagacaaatacttgctctaagattattttactaaaattgttcctggtaaagctctgtatttttagtaaaagactcaattccataaaagccagaatattccattcaccattctttatctttccctcagttcctcattgttccggccatcgtgggcagtgccctcctccatcggctgtctgatgactgctgggaaaagataacagcatggatttatggaatgggactctgtgccctcttcatcgtttctacagtatttcacattgtatcatggaaaaagagccacttaaggtacagtggatgacatgctgtttcaacagatccaaatagttgactcaacgtgtttggtacccttccaagctggcatgctttagtcaagtagggcaaagagtagacatttttctgccttgtagactagaatactatcccattattcaggacttgttctttggactggatgaagttttaggactcctccccagcaggcatctaagaaggtaggcctttgctcagtaaccccaaacaaaacctaactgattccccaggacttaccacttaaaaacctgagagctattttccagtactatcaagcacactaaggatatgatgagagcagcagctatggggtagtgacaaagcacactgagcttggagtcagcaggcaggctttgaggcccagccctgctctttaattttgggtaaatcacttgaccttgtggagcctcagtatctgtatcactaaaatgagaataataatacctgagtcacacagtcagtgtgataggtgaatgagataaggtacttgaaaataacttgaaaattacaaaagaccctatgagtgtgtgaggtatgaaggtatacttatagtttgcgtttaccattttgcaaagtttagctttcagaattaagtcttgtgtatattattcaaacagagttcacgtattttgctattaatagtcaagcactttcaaaacaatactatagctcttggcctgccaatgagaagaacgtaaacgctttcctcctctgagtgaaggattgattttggagcaccacaccatttaggtgggaatggtttgcttgtgaaatggattctgcacaaccctaaagggcaaaacttcttttcaaaaaaggaagtttcagagcagactatgagcaatttaaagaaatactcgaatatgccttttggttttaaagaacgtccaaaaaaaactcaaactattcaaacaatctgatatttaaaatatatgctccttttacaagcaggatttgagatttatgagatgattactggtttcctcacatgcagaatcctagagttttagagctgggaggatctttagaaatcatctaattcaaatcacttcatttttatttgggggaactgaggctcagagaagtggcctgacttgtctgagtcagtgaaactggcaaaatctgattattccaagacctctgactccaagtcctagtttttttcaccatatcttttacaatattgcatatagcttgcagtctgctaccttttcctgtaaggtgacagtttcctgggcttaaaataaaaccacagcattgaatcacaagggcactttgggacacactcacaagagaaccacaaaagtgcctgtcctggctccttaggacacactgtcgcagcgcccagaggccagtttagatgcaaagtactatattaccttcttggcacaatttagtgcttgtggttgtttcagcaaacttggcttcgatgtctagattttggatcaataaaaagttgtaggtacctacttcagtattctgggtctccctgccagaggtgtaatagaaagtagattctctttaactttgaatagcattgctagaatcatatgccatgtgtagatttttgctcctcattaaaatttctaaatatcaaaaaagccttatttaagtaaaagtgagaagggaatttgcatttattatgtggtaggtgctcctgtgtgctaggtactatgctagatacatggcctacattatctcatttaatgttcacacatactccatgagaaagatcttatttccactttacctatgaggtaagtgagagtcagagaggtcggtggcagattttggataagattccaggtctgttgtctacctactctaacagcgtatgacaatctagaaaacagaattagaaaggcccaaaaccttgctagaaatcacagtcatccaaggagttttaaaaacttattctccttcctccaccctctatctcacctcctagcacttcagaatcttctgaactggaggccatcactgtattttgtaagctccccaggggatgatatgcagtcaagtttgaaaagcattgacgtaatgtttgcttctttagacctatggcataaagtatcatctatgggtatgctatagcttctgatgactagtagactgaaacccattctttctcacaaatgtatttttcattcctttaaaactttttttttatttttaatttttgtggatacacggtaggtatatatatttatggaatacatttttgttttttttgagacagactatcactctgttgcccagactgtagtgcagtggtgcgatctcagctcactgccacctccgcctcctgggttcaagtgattcttgtgcttcagccatccgagtagcttggactacaggcgtgcgccaccacacctggctaatttttgtatttttagtagagacagtgtttcactgtgttggccaggctggtctcaaattcctgacctcaagtgatccacctgcctcagcctcccaaagtgctgtgattattgctgtgagccaccatgcccaggctttatggggtatgttttttcacttactcacacaagtctttattatttgctttggtcaatgttacgtgtagggggaggaaagtctaatactagcgttccctcaaattatagttatacctacttggacactgaaaatagattcaagatgatattacaaatttgtacttttaaattacctcagtaaagggcaaattccatctaatccattttatgaatagacctcagtgaaccaaactctttgtacatatacctctgacttttcagttttggaaggaggaacttgcttagaaatacaggtggctatgcttttgtagtaaatgtgccattttttgtttttgttactgtttttcctaagttagtttctgaatttcctttattactatttactgtccacaccaggatatttgaagtaaaaactgtaaataccttctaaaaagacacaaagaatgtgatttcagctcagggagtgtttactgaacatcaggactttgccctgcactgataggagctggggcaggttgcggggaggtggtctgccctccaggaacttcatttttctgttagaggggatccaaaagaaatggaaaacatcagaaaaagacagattttgtttgtttgctttaaccacttcaggctttctaactatcatggggctctgtccctatgtcttatatatgctgagagaatctattgtatgtgcaacctaaaaaataacagaaagcttttactcgtgacttcataacattaacagcaacaaaaatctgtgtaaccttggaagaacaagtgtaaaggccatgagaactagaacaagaatggaaattgcaacatagtggagtgataacccgtacttcccatctgaacactttctgacaaatttacttttttttccccctcactaggacagtggagcattgttttcacatgtgtgatagaatggttatctatttcttcattgctgcttcttatgctccatggtaagatacagtcttcctattttcgaaggtagtgattttatgattagaattcctcactcctcctttcctttctccctcttgtccccaccctcagccctcatgtgtacaccaccttccctcctcctgaacacatacatgcatgcatttttttccccatttgatgtacttgggtcagattgcatatttgaaggggagaatattgctgctgtttataatatctgggtattggattgttcaagaagtgctatgaacttgtgtgcagatagcttgctcactcttgaaatctgtaacctttgctctccatattgtttccctatacctctgctattgttcagaacactagaaaattgaattgttcaagtggaaatgctgtaaatatgtatgaggaaagcaagcttatttatttatttatttatttatttatttatttatttatttatttattttgagatggagtctcacaatctcggctcactgcaacctctgcctcccgagtttaagagattctcctgcctcagcctcctgagtaactgggattacaggcacgtgctaccatgcctggctaatttttgtatttttagtagagacggggtttcaccatgttggccaggctggtcaggaactcctgacctcaagtgatctgcccaccttgatctcccaaagtgctgggattacaggcgtgagccaccgtgcccggcctatttttttattttttgagacagggtctcactctgtctcccaggctggaatgcagtggcgtgatctcagctcactacaatctctgcctcctgggttcaagtgattctcacacctcattctcccaagtagctgggactacagacatgtgccaccacacccagctaatttttgtatttttggggggagacgggatttcactgtgttggccatgcagctcactgcaacctccacctctcagattcaagtgattctcccacctctttctcccaagtagctgggactacaggcgtgtgccaccacaccgagctaatttttgtattttttggtggagataggatttcaccatgttgttgataccaggttggtatcgaactccgaccccaagtgatctgcccgcctctgcctcccaaagtgttgagattacaggcatgagccaccatgcttggccatttttgtttgtttgtttgtttgtttgttttgagacagagtctcactatgttgcccaggctggagtacagtggcagtggcccgtggtctcagctcatgcaacctccacctcccaggttcaagcgattctcctgcctcagcctctcgagtagctgggattataggtgcctgccaccacatctggcttctttgtttgttggttttttgagacagagtctcactctgtcaccaagcctggggtacagaggtgtgatctcagctcactgcaacctctgcctcccagtttcaagtgattctcctgtctcagcctttgagtagctggggctacaggcatgtgccaccatgcctggctagtttttctatttttagtagagacgaggtttcgccatgttacccaggctggtctcaaactcctgacctcaagtgatctgcccacctcagcctcccaaagtgctgggattacaggcgtgagccaccgcacccagcctgtttttgaaacttaagccatttgtcttcaattcacctcaagtgcagtagctactatatagcaagtgtgtttatcatttcttttgctgagtaagagaaccatttaaaatacctagtatcctgttcattgcctttgatctttctgcctttttggtgctgatcaaatataatcttttgttgctttgaaactcttaattaaagaaacattagctttcttctacaagacataatccagttttaaaaactcagaagcttatattttgcaatcatctattgtagtcattagaaacagtatgcctctagattctgactaatgcagcatcaatgattcaaaagaaacctgattatctgaaggagtaaaatgtaagtgctatctttgcccagcatctgactaaattataggtcggcttcatgttggaagaacactgaaaggcttttatgaatggacattaaatgcccagaacaatgcttatttcagtaggaacctacagggtgttccaaacaggattccttacttagttattttaaattctttaatttaaaataagtaaatgaataaaattaatttaaatgtgagctgaggagttaaatatcatagtaggcaatttgtttacctgtagttttagatatgtaggctgtactttttccatttggaaatgtgacttttgtagttatagataatcaggacaacatttgtttcttcctcatttattctttttttttttttttctttgagacggagttttgctcttgttgcccaggctggactggactgcaatggcgcgatcttggctcaccgcaacctctgcctcctgggttcaagagattctcctgcgtcagccttccaagtagctgggattacaggcacgtgccaccatgcccagctaatttttttgtatttttagtagagatggggtttcaccatgttagtcaggctggtctccaacccctgacctcaggtgatccacccatgtcagcttcctaaagtgctgggattacaggtgtgagccaccacacctggcctcatttattttatttattttttttgagacagagtcttgttctgtcacccaggctggagtgcagtggtgcgatctcagctcactgcaacctctacctcctgggttcaagcgattctcctgcctcagcctccctagtagctggaattacaggtgcccaccaccatgcccagctaacttttgtatttttagtagagactgggttccaccatgttggccaggctggtcttgaactcctgacctgaagtgatctgcctgccttggcctcccaaagttctgggattacaggtgtgagccactgttcctgaacttctcatgtattcttaatatgaaattagtacaaatgaatttgcagcattttaaaattcaaacctcacaacagtccatggttaaattctaccaaaatgtcttccataatacatgttaggaataattcttctcatactctctcttggcagagagactgataatggagacacacttggtttgtgtattaggtatccactgtgggtatctgatcctgcgtcaaaattttgttccaggttcttctcattaaggtttgtaagtaatctgctcccaaatacatggtcagaaattaaagggcaagcagttttgacctcattctgcctaatagggtaagttaggcgtcataagagtgctgggactcccttcaacttgtctgcttttagctggttctatttttaaaccatgttgaaactaattcttttttttttttaggtggagtcttgctctgtcgcccagactggagtgcagtggtgcaatctcagctcactgcaacctctgcctcccgggctcaagcaattctcctgcctcagcctcccgagcaacttggattacaggcacatgccaccacacctggctaatttttgtatttttagtagagatggggtttcaccatgttggccaggctgatcttgaactcctgacctcaagtgatccgtctgcctcggcctcccaaagtgctgggattacagatgtgagccaccactcccggcctaattctgagtcttaaaggtcgactgacaaatttgtttttgagttgcttaattttacctaaattgcccaaatgcctgcttgatgtgttgagtgtgttttcttcctgctcttatcctaagactttctcagttttcaatgacacaggttctatgaattcccttcatttatcacttctgttctttgttgtcacgtttacatttttaggttaaatcttcgtgaacttggacccctggcatctcatatgcgttggtttatctggctcatggcagctggaggaaccatttatgtatttctctaccatgaaaagtaagagaaaataatttacatttgatagttttaaaattgactgcctaaatattatctgcactgcaatacaatttacttttatttgtacttcaaaacagtagaaatacatatatagaatatgttatttttaataaatcttcaaaaccatttggtattcattattagtggaaagattgctgtggaaaaacaagagtggtacaggtttggtataatgtagttgaggggacatggtaaccagcccctttggagtccatcagacttcatttctatagcatgaggcaaattggccttattctctgtgattcagtcatcacgtgagaaaaccagccacttgtcaaggtgtctatgaagattggagagaatagatattaagtgctcagtacaatatacctaaataagggcctagagggtattccaaaaagggtatcttgagaaaaaggatgttgggaaggacattggaactcttaatatcctatccctagggcacagctttttagccagttattcatagctgatagtcctaattattgagccatataaaaacaaaagctaattgaaatttagtatctttgctctagaggagaccttcaaggtcccctattccaacttcatgattaaaaagtcagaacatttaggatatgcatcaaattagtgactcatctggaaattaggacccaaacatccaagttctgattccattgctctttttattaccctgtatgtttgaatttgagaaacacacaaccaggaaatctttgtcattgggtttatttacagttcattaaattctgtatctattgtgcttggcagaatggctctcagaattgaacataatttgtgtttatcagaaaatactaaattgttttcccctttcagaagaagaaaatggtagttttcactaacttctttttgtctctgaaattcacttaaatacctttttgaccataattagcaatgctgagtagtgttatatattatagcatatttaagtccaagggaatggtttgcttcttggactcaaatctcttatttatatccttggataaaataggaagtcaagaaaggcaactatcttttctccttttcccggccttctggtgtaaacaaaacccataaacccattcttcccctatctgattatttcatggtaggctttgagtataaaacacgatgaatgaggtatgagtcacccttggccattcagtttggcagacattagggagtacctaaattgtatcaggtactgttctaggatttacagatcaaaacataattaatcttggttcctgcctttgaggagcttatcgtctggtttgattaggctgaaatgtaatttgaatttcaatacaatgtatttcttagggtttttagatcttttgtagtctaacgtgatgagccttaaaattacagtttgtgcaggtgcaaaataaagagacaaacaaaattacacgtcctttccttagggcttgctgttcctttttgctgataaactaggctccaggctgcatctccattcatcttcagaatttcacttctagctctggattggaatggtaatgaaagcagacactctaggatcagaagaggaaatattttacaaggtggagtgggttaaacgataactacttttggcagaaaacattttcttttttttttcttttctttttttttttttttttgagactgagtctcgctctgtcacccagactggatggagtgcagtggtgcgatctcggctcactgcaagccccgcctcccgggttcacgccattcgggttcacgccattctcctgcctcatctccccgagtagctgggactacaggcgctcgccacgcccagctaattttttgtatttttagtagggacgggtttcaccgtgttaatcaggatggtctcgatctcctgacctcgtgatccgcccgcctcggcttcccaaagtgctgggattacaggcatgagccaccgtgcccggccggcagaaaacattttctaggtggcatgtgggatttgatgccttttcaaccctgagagaaatgctagttccttgttactcagctactgtgttttagttagaggcctagtggttgcctactgagaaataaagttttatttgaatagttaagagtttacatttctttctcaaaagtaaaaaggaaaggctggtatgtaaattgttaggtgttatagaaatttataagttaaattaactgcatttttgttcctgcagatataaggtggttgaactctttttctatctcacaatgggattctctccagccttggtggtgacatcaatggtaagacatggcttcagaattttagttattttcttttaagctgctggaacttaacatgattatggatatgatatgtagcttttctttataaagttatgtccattaaatagaggctcaaaagaaaaagaacttataaataatgaagtgtttagctcggcatggtggcatgtgcctgtggtcccagctacatgggaggctgaggcaggaggattgcttgagcccaggaggttgaggctgtggtgagctgtgttcatgccctacagcctgaggaacagagcgagaccctgtctcaaaaaaataataaaaataatgaagtgtgccagcaactcgtaagcttgcactaggtaccgtgtacagtttgggaaagctataaattcaggtatgtttctgtctttatggtactttcctgaatcagaaccagaataggttcagagaggtatttttcaaatccctttactcttacttttcctttcccttgcttttaagtcgtaagtcaagcactttttttgtttgtttgttctgttttctaaggcaagcacttttttttttcttttactttgcttgaaaatatcttttggggattttcgtgggtaaagtgtaacattacctgtaataggcagttgcatgtatatatttgaattccctttcaaattgaattactgttgagaagtctgtgtgtgtctgtctttttgaaatgaaaatatattattacgacttcatggttccatccacctggttaccagccctttagcttatatattgcagtatcttaggctctaggcactatattaactaaggaggtcccaaggtgtttcgtttgaacccttctgagcctacattgttcagaagaactgtacttaggatttcactcctaatctcataggcacattgtaagaaccttttttttttttttcttttttttgagacaaagtcttgctctgttgcccagctggagtgcagtagagcgatcttggctcactgcaacctccgcctcctgagttcaagtgattctcccacctcagcctcctaagtagctgagattacagatgcgggctgcaacccttggctaattttttgtatttttagtagagatggggtttcaccaagttggctagtctgttcttgaactcctgagctcaggtgatccacctgcctcggcctcccaaagtgctgagattatatgcgtaagccatcacgcctggctgtaagaacataattctgtgatagtttttttcctggtcacagaaacacctataaaaggtttaaaagtttcaaatctggttctgttttttcaggggatgtcttcatgagaatataacaaaatatatttctttgagatacgaggtttatgatggctttaataattacctagcacccaaaatacatatagatggtaaaagcaacagggaatggtaaggaggaggagttaaaggacagaaatgagaaaatcagccttgaaggccatatagttagaaggcatttcaggacaccccaagcaatataagcaaggtttgtgcagcttaatagagtagaatttcaagcaaattccctctgggtatcataagagcaggtttatccagtaattttactagcctaaatttgaaattgacatttccataagtggtacaatagcaggtgactaatgtttgtgataatcaagcaggatgatcccccacactgccttcatagaacttagagtcaagcaggcaaatgcagttcctattaaagaaaaagagatcatgaaatttgataaaatatttgatgggggaaagttcaggctgctatgcgaacacgacagaagtaccagaggaagtgatatttcagctgatttggaaaaacatgtagaagctgagagatggtaggggtgaggcaagtgttacaggtagagaatacagcatgaaggaagcccagagaagggggaagcaccagcatctttggagaaatgaaaatagctcattgtttgtaacataaaatacatgtaccagcttgagttatgtacatatgcatggtgggggcaggtatgcaggtagcacaagtcttgtaataaagctggagagctagacaagagtccagatcacaaaggacctcaaaagccactaacacagtaacagaatgaatgaaaatgcgaatctttggttctggccagaatcatgggtctcagacttacccttctgccataaagaactgtaaaactagaaaaagaataaaggcaactgtttttttggctctgaacccaaacagtacaggactgtgatccttgaaggaagagaaaccaagaaaatgagctttgaattcaccccagtagtttccctggagacactttccaaacagcaacaaaaggaggtaaagcccagagaacagcagcctgggtggaggaaacagaaattacagttcaggttactgacatggctgcagtttgtggggcagggtatggaagaggaggaagccgctcagggaggatgcttcagaaatccatgaagcagtttccgtgagtcgttgtccagatatcaagctgaatgttgtacgggccaaaactctgcaagctccagttgcaaataactcttagaaggctggaagataaatggaaattccggacagttcccagtgctgaaagacattgaagttccaaccaagcagagttcagagatggtgctggacatcccaggcactcagctgaccctgccaaggccacagcttaggagtagagctactctatccctagagggagggctactctagaactgccataacaaggcccagacaaaccttgaaaggataaaattgatcctccagtaaataaaccgcctaacagaacaaaactcaacaatttttaaaggaatacaacagaatctttactgtaacaacttagcatgtaccataagtaaatattatcagaaataaatcaataataatgtaataaaataaataataaatatataataaatattaccagatgggcaagaaactggaaagtgacacatacctaagggaaaacagatcaatagacacagatcaaaagacgggagagatactgagattcacacacagggagtttaaaacagatgaggaatctcagaaaatacctggagactatgaagaagaatccacatggagattctagatccgaaaactgtgatgtcttaagaaaaaaaaattattggagggatttaataacagattggatattgcagaagcaaagttcagtgaacttgaagccaggtctgtagaaactatacaaactgaagcatgagagaaaagagtgatttaaaaatgaacaaaagaagaaagaaattggggcagttttttgttttgggttttctgttttacagtttttcttttcttttttttttttttttttgaagaaataatagttacaacttttccaaatttgatgaaaaatatcaacctagagatccacaaagcacgaggaggcctgagcagtataaacacaaagaaaactacactaagacacattaaagtcaaattactaaaaaacaaaggcaaagacaagaccttaaaatcagccagagagagaaaaaagagcaaggagagaagatgaccactgacattttatcagaattcatgggagcaggaatacaatgtaatggcacatttaaaatgctgaaagggtccgggtgctgtggctcacgcatgtaatcccagcacgttggaggctgaggcgggtggatcatgtgaagtcaggagttcaagaccagcctggccaacatggtgaaaccctgtctctactaaaaatacaaaaattagctgaatgtgatggcagaactcctgtaatcccagctactcgagaggctgaggctgaggcaggaaaatcgcctgaacccaagaggtggaggttgtaggaggttgtagtgagctgaggtcgggccactgcactccagcctaggcaacaacatgagactccatctcaaaaataaataaaataaaataaataaataaataaaatgcggaaaggaaaaaacaaaaaaaccctgtcaacttcaagttgaagttagcacagtttagtaatattaatgtcaaaaatttaaccagggaggccaaggcaggcagatcacttgaggtcaggagttcgagaccagcctagccgacatggcaaaacccgtctctactaaaaatacaaaaattagctgggcgtggtggtgggcacctgtagtcccagctacttgggaggctgaggcaggagaatcactggaacacgggaggcagaggttacagtgagccaagatcgtgccactgcactccagcctgggcaacggagcaagatgctgtctctaaataaataaataaataaaccaggattgctagaaatgatgaatttgtatgtaaatacatggctgtttttcatttcttaatttcttcacaagataacatgggggtttctaacatgtagaagtaaagtacatggtaacaatggatggggtggagaaatagaagcacattgttttaagggtcttaaccttgtatagggggtataataataaaggtacattgtgatgagctaaggatgcacactgtaatccgtagaataaccaccactggccaggcgcggtggctcacgcctgtaatcccagcactttgggaggccgaggtgggtggatcacgaggtcaggagttcgagaccagcctgaccgacatgatgaaaccccatctctactaaaaatacaaaaattagccaggtgtggtggcacacgcctgtaatcccatctacttgggaggctgaggcaggagaatccacttgaacctgggaggcggagtttgcagtgagctgagatcatgcactgcactccagcctgggcaacagaacaagactccatctcagaaaaaaaaaagaataaccaccaccaccaccaacaacaacaaaagcaaaataaatgttatagttaagtagtcaagagaaaagataaaatggaatcccaaagttattcaatttagtctaaagcaggtgggaaaattggaaaacggaaacaaaggatggatgaaaccaaatagaaaacagagagcaagacgggaggcttcaatacaaccatatcagtaattaggtacctcatatataataacaattacatcacaatggactgaacactccaactaaaaggcagagattgtcagactggataaaaaagttttctcatctgtataatggagataatagtacctaatttagggtcgttgtgaagattaaatgaataaatatatgaagtgcttcaaacagtgcctggcacatagttacaataatgataatgataatgaaaaaaaaattctgttttgatacagaattaactatgttctaggtctttgaaagttgaggtaaatgtggtatcttgaggatactagttaacagaatgcatgtcaaaactaacctgcgtacttggtttggtgtcttgcttgttttggcagaaaggaaaaaaaaggatattttgtaacagtgactggccatgtgattttgttcaggccacttcactgctctggccttagtctcctcacctctgcaataagggggttgtgttagatgagtgactcttactatttgggagtccctgtgcccctttgcgaatctgatgagagccttacccctatcctagaagagggctcctaatacacacacaaatacttttgtataatgtgtattcattgctgtataaccttgaggaattaataacgtgtggtattttgtctttgtttttactttttaaataaaaataaatctagctgaagtcctttcttaccaaggttaggaagaaatccaatgtcagtccatttggattggctccttccccatcttttgatcccacacaaaacatgggggcttctgtgaactttgaaaaaggactgaagctcacagctggccctagatcctcacacctggtccttagctcatgatggtctattgttgccttgcttttagccgagggccttggggcccattctaatcaggtgcctgagttagagcttccctttactcttgcggggcacacaaggctgctgcccagtgcccaggcctctaggacacccacacacctatccccttccaaggccctgccgtgatctgccttaggtttccattcactctgcagaacctgtctcctttctattcctagtcctcagaaatccaggggactaacttgtttcttcatcagcttctaagcattgcctctattctctctcctcattcatacaagccattttaatcttgtagatgggccttggtctttgaaaaccaagaacagcctaaaaaattctcccttctgccctaagacacacaagaatattaacttattgctaagctaagcaatggccaggctcgaatacaaaaaggcctggagacatctagaaggctaggaaatatcttgtactatgtgatctgtgatttcagaggtcacttctagttacggttttcctgtgtcagccttaaggaatctataagctcacataagcaggggaagtctcaaagcagcaatcagtgtagaacagtgtttgagaaggacaaagggaagtaaataccctgcctgagatgtaaattataaatagagtggcttgggcctgccttagtagggaaggaagcatttaaaggggaagatgagaacagaggattgcactttattaaaatgaactcccatgtctggctatgattgcagtttgcttaaatatgctgtaaatgagcagaatgttctgctttttcatttgggacctgtaatgtgattgcttgctcaactcaagagtgtcagtccaaagggcaatccaggtcgatgtataagagactttttttatgtttggttcatgtttacagatcaggattgtgttcacacagcttcttcattgtctagaaaatcaagagccttagagagaattacagttatctgtagcttgccatgcagagtaacatcaaaccctttttatttttttttctctgttgacagaacaacaccgatggacttcaggaacttgcctgtgggggcttaatttattgcttgggagttgtgttcttcaagagtgatggcatcattccatttgcccacgccatctggcacctgtttgtggccacggcagctgcagtgcattactacgccatttggaaatacctttaccgaagtcctacggactttatgcggcatttatgaccaatctgtactaattctccaaaccagtattatttcaattatggcacttgggagtggggtgagagctaaacattgcacagggaaagaaaaaaaataactgcactgactttatatcttttgaatataattactgtgaaagtataaaggctgtgttctggaattttctgcctcacagcaaataaataaggtagtgaattaattattcattccattccactatcatgaaggactctgaatagacttggccaactgatgtttacaaaccagacttttatattttaattttacagattttactacatgatttttctaaattactatgtcaggttgtaaaagtcagtgcaataacaaaccttcctttttaagaagaaaattgtttctattactttcccattcactaggtaaagaatcatggacagaacttacactactttttaccatgtttcatcttggcataacatggttcttttttaaatagaaactttagttttttgtaaatttttaaaaaaatatttcattgatatgcatctctgcaggtcctcattcatgttgtaaatttttgcagcaagcagtcaacattccacaaacgaacaaacattatacctcttctgatagttttattaagcatggagaaattgccaatttttaaaaactgcagttttccaaacttttctgccaacctcttactctgaattcagtgctgctttgggacatatacttgacctagcttggtttaccagtgatggaaaagtattttgatatcattaactttttcaaaagatccaactttttctctatgcctttgccacattctcttcagggtctctttccacagtggataaatgttttttctgtattatgacagtattgttgtgatggccatctgctggaaactcctgaagagcattatgtattacagtgagcagttgtattgcctgtttggtgcccaatggttaagtcattgtcacttagctttatattgtcagtttgatatttattttaaattgtggaactagatgcataaattcacatttctgcctttcctttgcatcttctcatatattgtgtttttttttttttttcctagaaaaaatatttaaagcattgtttgacaggtagaaactcatgtatctgtagtccatgagttatatcctggctcagtggagtgatatttatgtattatttttacttttctctcagtgtcttatattaagattaacatgttgttaatagttgctttgttgattaatctctcttgttggtgttttaataaatgaaataggcttgcctttagatcgggtgctgatattgcctgtttcctagtaatgggctgatcaaatgatcagtggaattcttggtttgatgataaccttattaattgaaattttttactgatgtggctttaaaagaggtttattttgtatatgtttagaactctctgattttgatgaattatatgggaatgagaaacagaagaagtggtatttgctggcgagttaaataggcaaggtacccagtgataacaccaaccaaaccactcctatctgcatgattctgaacatctggatgcctgttgttttactgtgtatattttatttttaatatattaactttgtggattcatttaaggtctactcaaaagtaacactgtcaaaaccactaatatgtatgtaaaaattgtgctgtatactacaataaagttgttacttggatttgttccactgtctctaaattagatgactgtgaagaaaaatgaatacaccctgtcacttagaactttctagtctactttttaataattgaaatgccagagtcagctcaaacattaatcaacagacattttcagtttaaaatacactagtcaggacctaatgatttcaagttttttagatgatgcatccttaccaaggtaagccttttggtttagcatatttaatattctataggactgaggtgacagtcttttatgttaccaaccagacaagtagcagattataaatcttaacaactctcctagtgttagatgccattctacctcttctgtagtgtgggaaaccagggccagagaagttcaactgcttcatcctaaatcagggagctggaacagcaaccagctctatctgattccgaagcctcccattgactataccactgcatttctagagtcagcaaaaacaaataaaaaaacttgaactaaaaattcatcaggcatggacacagaaaagaaaacactattcacatggtttagaacctcaataatccctcagataactctctgtcaaatctaattttgaagattgagtgtcttgaagcgttatgattcccaagagttctgtcctttaggtcaccagtgtgacctcatccatttctagagtgtccccactattgtgctgtcagcttcttggtcagtatcttcagccttaaactattttctaaggactagacctctctctagtcaactgcctaaatgctcccagacatattgactcaaaccgtcccaaactgatttcattatctttcctcatcctaccaccaaacctattttctgaaatttcctaacttagttaatggcatggccacagccatctgttcattcatgcatccttgatttcttgcaccccccagatgcaacaggtcagccagaactgtcacccctgcctttctcacaactccctggtctggttcctcacctctcttcacactgcagggtcctaaaaagacctacttagcactcatcagactacagcagccacctcctcatttgtatccctgccactgcttacacccctcaaatgagctcatcctccacactgtaccagcattatcttcccaaaataaaatctgagcatgtgtctcgatgctccaaaacttccactgactattatcctataagattcacgccagatgctttagcatggactcttcacatgctgactccgcctgatcggccctctccccagctgaaccccacttgacatcagccctgctagtgattttcacagcctcccccacaacacacatgccctcatggtgcttttgcagctgtgtttttgtacctgctgttccttggcctggaatgcccttactccagcccctttcctacctggcaaatagttgcttattccaagccttcatcaggtgccacccatctcccttgtgccattgaccaagttccccctggcatgagtagtagtgccctcctttgaccccatggcacagatattccttcatggcccctgtcatggtgcattgtgattgtgtttactgtctttacctctggtcttgggactgacctccttcaggcagggacagagtctcatccacttctgttcctagcttctagcatagcactggcttatgacaagagtgaagaagttttgttgaatgaaaggggcagggtcgggggaaggttggagaatgttgctgtggaagggaaagactgagaataaagcattttttaggacagactttggttttagcaggtttatcctgtccatcacaagcactcttactagctggaaactgacttttagcttcttaggccttagaggcttttttgaccacaagggtcagctagaacattcgtggcaaccacaggaaagttgatgagaaaatagagtgtaaatattagaaaatatgtcctaaagaagaaaatgtccagcatttttattggtgctttcctagaaataacaatttacaaaattattttgagagaaaaaagtatttggcctaacgtatttccctctggtcctcttttctgaatatagtaataaaataaaacaattgtgcaatcattgggtcttagtgcagattatactccagaagcaacaacttaaatttttaaaaatattttgaatatttttactttaaaaatcatacagctatataaaatcctttggaaaatagagaaagctaaaaattatccagcattcatttatcataatatattttaatatacttgcaattttttatttccctatttttattatacagctgtaaatatgccacatatgtaattttatatactttttcctacttattataagcatttaaaaatactattatattggccgggcgcagtggctcacgcctgtaatcccaacactttgggaggccaaggcgggcggatcacgaggtcaggagttcaagacaagcctgaccaacatggtgaaaccccgtctctactaaaaatacaaaaaaaaattagctggacttggcggtgcatgcctgtaatcccagctactcaggaggctgaagcaggagaattgcttgaacctgggaggtggaggttgctgtgagccaagatcacaccactgcactccagcctgggcaatggagcaagactccatctcaaaaaaaaaaaaaacaaaaaactattattactattatatcatttcatagcaagaattttcaatgatttcatcatctttcagaactggatatgcagcctattttgcttaatcatttgcctaattttggatatttagattgctttagattttttaatataaacaatgctgcagtgaacatacagcttcgtccatatttatgactgggttttaaaggtaataataataaacaactgactgcttcttatgtatcaggtactctgctagtttacatggattatctcattttatgtttacaaaaaacttatagataaatcattttcttattcccattttacagatgaggaaacaaatacagatgaataagtttccttgcccaaggtaagtggcagaacccgagtgaacccaggaaccctagaggcttttttcattttcaagagagccattcctggggcaaaggtttattgatgggtttacccaaaggaagaccttttaaaaatagagctcatttccaaatctctacatttatacttggtgtcttcagtttatgtctactcttctcacgtgccagtgagatggagagtggaataggaaaatctccaaaggaaactgacctcgaagaagctggttcacctccctccttgtgcagcaaaataaaagtttctcaaggggccccgaggaatgtttttagtttaacaaggttagaattactgcatttatgtctttctactgcttttgctattttaaatagacagtgccaatatgttcttacattctgtgccattcccacctacatccctgcaatggattggtggtgttatttttccaagaaacagtgccactgtgcactctcgccactctgcaaggggagttaagctattctcatcaggggcctgttcaacacaacagaacgctttctcattctgccacacagctcattatcactcagactttcactgcagtcagacttgtgaagtcaaaatagactagcaaggcttaaggggggcttgggaaagtaggctttggaggcttgccctatctcctgggagaggtcacaggtcctttgctgttctgtgccaggccacacttaacacacccgatctactgtgtcagtcactgaaaaggtcaggaaaactttttgatcattaggatttggttctcttgaagtctcttaaagtgttttttgaatcccatctatgagctgcgtgttgagtcagggtggaagcagacagcctgtgacaaattggctgggtgagcttcggtaagtttggtattactttttgagcttcagttcctgtctgcaaaaggggtatatcacttctcttgcagtgcggtcataaggattaaataatatgttgaaagtgtcaagtttatacagtctgacatatgattgacactgggtaaataatcctagtgcttctttcccatatggctgagcttttaaaattatgattacagcccacctggggatatttttcatgcacaaacaacctgaagaacagttcagtaccactcttaaaattgttctgtgcattttctagctcttataaatggttctggatcaaatgatggccgaggctaaactgaggcatgtggttaccccagcctttctaataattttgtgtcattttaaacaatgttctttaaacattcaagttttttttgtttgtttgtgttttgtttttgtttttgtttttgttttgcggagtcttgccctgtcacccaggctggagtgcagtggtgcaatctcggctcactgccacctctgcctcccaggttcaagcgattctcttgcctcagtctcctgagtagctgggactacaggtgtgtgctaccatgcctggctaatttttgtatttttagtagaaactgggtttcactatgttgtccaggctggtcttgagctcctgacctcaggtgatctgccagtctctggctcccaaagtgctgagattacaggcgtgagccaccatgcctggccaaatattcaacatttctttagacaagaacatgagtattcatagagaaagggtagaaaaggaggaggctggggcagttctttatgtccagataggagctgcatgctttgcttagcaaaacaaaaggccttcaatacattgagcccacactctgtcagtttggacagcaatttggtcaccatctgtgcactctcgccaacctgagcatgcctcctgggggactcacaccaacgggctcctagtggcttattaaagaattccttccaactacagtcgtttaatgccttctccaccttgtttctttcccagtgatgttgtagggtcctttattcacacattcattcaacagatgtttattgggtgttgcctatgtgccagggaccagtctagggactgaggatgttataacagaaaaaaaaaataggaacaaaaaggccaaattcctgcttgttgctcagtctagatgattctctgccccccaacttccttaatctggatttgacgttttggggagcttttgtcaatctgtttgttggcatcacacagatagatgactgtggccagtgaatgtgacagtgtgcatgaccaagtagaaagtgatgctgatttacctgtcttttcaacaagggtcccgtactttgtgttattcatttgtgcatctgctagggtgaggtcgaattgcctgtttgaaagatggctcttacttatgagagcaccaaagcagctcattatttaaagaaacttgtgaactctgccctcaaatgaataaccctcatgtgtgaatgaatcaccctttgctttagctgaacatttaagcatgccgggttcattcgaagcagggcttacctatcctcccaggcaaaggatgatgaatgggcaacacctgtgtgggctgagatatttttttccttccttgtttactgtgtttgggatgcctgaggtccatccatcattcccccagtcctgccatgtgtcatacttgtattagaggctggggacacagtgtccaataaggtaagtctctgccctcaggggagaaggatgtggagacaaatgaacaattataacacaacataatctccacctgtgtattggatgctattattggaggagggagtgattagccctgtccagggcagtcagaaaccctctgtacagaagcagtagtatggctgacactcaaagggtgaatgaggaattgccagggagtcaagtgagggggcagtgggtagagacagggtcaaagaaagacatattccagggagaggaaagagcaggcttcaggaaagggtgaggtgtgtggaaggggacataataataatagctaatattgactgattccctactaagggcccagttcattctttatgttttacatacctattgactcatctattattttgaggagtgagaaagacaatcttgtatacatatgaattcttctgcagcagactaaatcttagatggcgtattgttcagttcttgcactgctataaagaaatacctgagactgggtaatttataaggaaaagaggtttaattggctcaccattctgcaggctgtacaggaagcctaagagcttctgcttctggggagccctcaggaaacttacaatcatgggggaaggtgaagggtgagccagcacttcacatggctggagagggaggaagaggcgggggaaggtactacacacttttaaacaaccaggtctcacaataactcactcactatcacaagaacagcactgaggggatggtgctaacccattcatgagaaatctgtccccatgatccaatcaccttccaccaggccccacctccaacactgaggactacaattccacatgagatttggtgggcacacagatccaaaccatatcagatggatttctttgtcttaatatttggaacttcttttccttttttgcccccttgcaaacatgtaccaacatagacttcttacggaaggcgaatattttgtcattcacctgagctaatttctgtgatactgtattaaatggaaagaaagcatgacgaagtatattatgaattggttggactactggggatttctttactacaggggatttctttgcttgtttttttttttgagacggagtcttgctctgtcacccaggctagagtacagtggcacaatctcagctcactgcaacctctgcctccggggttcaagtgattctcccgcctcagcctcctgagtaactgggaatacaggtgcctgccactgtgcccagctaatttttgtatttttagtagagacggggtttcaccatcttggccaggctagtctcaaactcctgacctcgtgatccacccacctcggcctcctagagtgctgggattagaggcgtgagccactgcgctcggcctactattggggattcttatcctttggtactgacatagatcatctggatccgagggtatttatagagaccctcatccaggtgtccaattcatttaaagagtgagccccttgtaggtgccagatgctgctcctggtgttgaggataaagctgtgaacagaacagacacaagttcctccttcatagaacagacattctagttgtggggaaaatagccaataaacaaatatataaagaaaatatgtagtgtatgagatggtgatatgtgctagggtgaaaaatcaatcagggaagaggtgtggaaaatgctgagggtgtgcggacgtgtgctcataaacatggaagctagggacagtctcattgagaaggggatatttgggtaagacctgaaaggccaagggccctggccgccagacacccgctaagaaaggcatccaggcctagcaggtgcaaaggcctgaggtgggcatagcctggtgcagaaaaaggcccgtgatgtagggttttgagcgaggggagagcaggatcggcaatgaggtcagggttgtgacaaagactgtcttttttgaccagacttgactcaggcttctctgagtcctctttctgactaatacctgaccttgggcgttgtcatcctatttggtccagttttagcaagaatcctactgggtcatttcagcgaaaattctccactcttgatatctgatcaacctccttattattccgctggacttccttcagcaagaatccttcaagttgtgacatttcttcttagtaattttccatccactgacccctaccctgctccttgtctatacatctccacttgtccttgttgtttttggaattgatcctgatctctctctcctactacaaaatcccattctagtagtcccgctgaataaaatctgccttagcatcttgaacaagtgtcatgaattatttttttctttaggaggggtactgaatgccggggtacacagcgtcctgtaagccatggtaaggcccacaggcacaagtgcaaggtgattattagtggaagaatcattcatgcttgggtattagaacatcccagcctctggattcatagcactgagttaagtcctagctcctaaagccaaaggaacatgggcaagcacccaagcctctgcttatctttcaaatacagattatactaataagaccatcagcctcacagggtagaaaaacactgtgaacatttgagtttaaacatgacactgtcaacccaaatgagagaatgaggcaggagtctcaatcacccaaggtttattgagccagagcctgagggaacacccgggaaaaatacaagtcacagaagcccctgtggcctgtgctgtccaaagaggttttcaggaggctcagcatttatatgtttctttaaaggtgaaaagcatgcaggaagtggggactaggcggtgaggcaaacgattacattcttgtgaggctctacttagtgcccagtaaatctacattttacacaagattcagtgaacatttaaagaagagggagtaaaaacgaagagtcaattatgtagacatggcagggtggaggaaggaatgattgatctcgtctagtccttgttctgtacctggggagataagctcgatatttgtccatgtgagacttaacagaccttagttttaggagctaaattcagcttacagacctaaagttacaactgacatgtacttgttttataggaggatatacatcttgaaaggttaaggggtcatcccttgtgagggcagtcatccagaggggtgcaggaggccttttgcctttgtgggggtctggttaatgtataatgctttgacacaaggttgggaagtaatcgctgtctgtttgggaaaaggatggtaacgttacctgactcaggcttaactcttcctttggcataatgagtttgggaatcctgagacttttattttgctttacatcaccaactttcaagataaaatgaaccaggtattcccaagcagccctgaagtcatcctggctgacctccctccccaacatcacccactcccctcgtgcccccctccccccagctgtcctctgcccctttgaaagaaagcatttttgtggccgagcacggtggctcacgcctgtaatcctagcactttgggaggccgaggagggcggatcacgaggtcaggagatcgagaccatcctggctaacacgatgaaaccccatctctactaaaaatacacaaaaattagccaggcgtggtggtaggtgcctgtagtcccagctacccgggaggctgaggcaggagaatggtgtgaacctgggaggtggagcttgcagtgagccgagatcgcgccactgcactccagcctgggcgacagagcgagactcagtctcaaaaaaaaaaaaaaaagaaaaagaaagaaagcatctttgtgcagtgtcttatctctcttctacccattgatttaagtatgttcctgtgaatgtgttcgtggtagaaatagcagcctacatctggcccaagtctatctttattttcacttatcggcattaggagctcgagccagtgagaaataaaaggctcttcacagatccgttttggggaatgtgacctggcaatcagtggagaggaaagagacaagcagttgacttggccatgctgagccttgatttcctcatcttgaaagggaggattatgctgtcagcctcaaagggctgcagtgagatgatttacataaagtatctagcacaggacctgaccatcaatatgtgctgaattccattcccagctatgcaccttcatcagaggtgctctgatgaatgttgaatagcccttggttatgaagggaaagaggtacaggtagattgctctcatatttatctcctttcatttcatattagggaaaaatggccctccttctatcaaaggctcttcttcaagcccatcagctatttggaccttattctaccaatcctctcttcctttccctatttctggccttcatcatactta

SEQ ID NO: 3461 - DNA, 1935 bp, Homo sapiens
agccgggctccggggcggggcgcaggagccccggggcggaggagccggggaggcgggaggcgggaggcgggaggtgttggggccgttgaagcggcctccctcccgcccccagccgcccggtctggccccagccctgtcccgacccccggcctggcccactccgaccctacccggccgaagggttccgctggacacgcaggcggcctccggagcagcccaagcccatgagggccgcgcgcccggccgccggtgctgacgagacggagctcctggcccccgaggaggagcagaggatcaatgcggttcaagaatcgattccagcggttcatgaaccatcgagctccagccaatggccgctacaagccaacttgctatgaacatgctgctaactgttacacacacgcattcctcattgttccggccatcgtgggcagtgccctcctccatcggctgtctgatgactgctgggaaaagataacagcatggatttatggaatgggactctgtgccctcttcatcgtttctacagtatttcacattgtatcatggaaaaagagccacttaaggacagtggagcattgttttcacatgtgtgatagaatggttatctatttcttcattgctgcttcttatgctccatggttaaatcttcgtgaacttggacccctggcatctcatatgcgttggtttatctggctcatggcagctggaggaaccatttatgtatttctctaccatgaaaaatataaggtggttgaactctttttctatctcacaatgggattctctccagccttggtggtgacatcaatgaacaacaccgatggacttcaggaacttgcctgtgggggcttaatttattgcttgggagttgtgttcttcaagagtgatggcatcattccatttgcccacgccatctggcacctgtttgtggccacggcagctgcagtgcattactacgccatttggaaatacctttaccgaagtcctacggactttatgcggcatttatgaccaatctgtactaattctccaaaccagtattatttcaattatggcacttgggagtggggtgagagctaaacattgcacagggaaagaaaaaaaataactgcactgactttatatcttttgaatataattactgtgaaagtataaaggctgtgttctggaattttctgcctcacagcaaataaataaggtagtgaattaattattcattccattccactatcatgaaggactctgaatagacttggccaactgatgtttacaaaccagacttttatattttaattttacagattttactacatgatttttctaaattactatgtcaggttgtaaaagtcagtgcaataacaaaccttcctttttaagaagaaaattgtttctattactttcccattcactaggtaaagaatcatggacagaacttacactactttttaccatgtttcatcttggcataacatggttcttttttaaatagaaactttagttttttgtaaatttttaaaaaaatatttcattgatatgcatctctgcaggtcctcattcatgttgtaaatttttgcagcaagcagtcaacattccacaaacgaacaaacattatacctcttctgatagttttattaagcatggagaaattgccaatttttaaaaactgcagttttccaaacttttctgccaacctcttactctgaattcagtgctgctttgggacatatacttgacctagcttggtttaccagtgatggaaaagtattttgatatcattaactttttcaaaagtggataaatgttttttctgtattatgacagtattgttgtgatggccatctgctggaaactcctgaagagcattatgtattacagtgagcagttgtattgcctgtttggtgcccaatggttaagtcattgtcacttagcttt

SEQ ID NO: 3462 - protein, 238 aa, Homo sapiens
MRFKNRFQRFMNHRAPANGRYKPTCYEHAANCYTHAFLIVPAIVGSALLHRLSDDCWEKITAWIYGMGLCALFIVSTVFHIVSWKKSHLRTVEHCFHMCDRMVIYFFIAASYAPWLNLRELGPLASHMRWFIWLMAAGGTIYVFLYHEKYKVVELFFYLTMGFSPALVVTSMNNTDGLQELACGGLIYCLGVVFFKSDGIIPFAHAIWHLFVATAAAVHYYAIWKYLYRSPTDFMRHL

SEQ ID NO: 3463 - DNA, 2735 bp, Homo sapiens
agccgggctccggggcggggcgcaggagccccggggcggaggagccggggaggcgggaggcgggaggcgggaggtgttggggccgttgaagcggcctccctcccgcccccagccgcccggtctggccccagccctgtcccgacccccggcctggcccactccgaccctacccggccgaagggttccgctggacacgcaggcggcctccggagcagcccaagcccatgagggccgcgcgcccggccgccggtgctgacgagacggagctcctggcccccgaggaggagcagaggatcaatgcggttcaagaatcgattccagcggttcatgaaccatcgagctccagccaatggccgctacaagccaacttgctatgaacatgctgctaactgttacacacacgcattcctcattgttccggccatcgtgggcagtgccctcctccatcggctgtctgatgactgctgggaaaagataacagcatggatttatggaatgggactctgtgccctcttcatcgtttctacagtatttcacattgtatcatggaaaaagagccacttaaggacagtggagcattgttttcacatgtgtgatagaatggttatctatttcttcattgctgcttcttatgctccatggttaaatcttcgtgaacttggacccctggcatctcatatgcgttggtttatctggctcatggcagctggaggaaccatttatgtatttctctaccatgaaaaatataaggtggttgaactctttttctatctcacaatgggattctctccagccttggtggtgacatcaatgaacaacaccgatggacttcaggaacttgcctgtgggggcttaatttattgcttgggagttgtgttcttcaagagtgatggcatcattccatttgcccacgccatctggcacctgtttgtggccacggcagctgcagtgcattactacgccatttggaaatacctttaccgaagtcctacggactttatgcggcatttatgaccaatctgtactaattctccaaaccagtattatttcaattatggcacttgggagtggggtgagagctaaacattgcacagggaaagaaaaaaaataactgcactgactttatatcttttgaatataattactgtgaaagtataaaggctgtgttctggaattttctgcctcacagcaaataaataaggtagtgaattaattattcattccattccactatcatgaaggactctgaatagacttggccaactgatgtttacaaaccagacttttatattttaattttacagattttactacatgatttttctaaattactatgtcaggttgtaaaagtcagtgcaataacaaaccttcctttttaagaagaaaattgtttctattactttcccattcactaggtaaagaatcatggacagaacttacactactttttaccatgtttcatcttggcataacatggttcttttttaaatagaaactttagttttttgtaaatttttaaaaaaatatttcattgatatgcatctctgcaggtcctcattcatgttgtaaatttttgcagcaagcagtcaacattccacaaacgaacaaacattatacctcttctgatagttttattaagcatggagaaattgccaatttttaaaaactgcagttttccaaacttttctgccaacctcttactctgaattcagtgctgctttgggacatatacttgacctagcttggtttaccagtgatggaaaagtattttgatatcattaactttttcaaaagatccaactttttctctatgcctttgccacattctcttcagggtctctttccacagtggataaatgttttttctgtattatgacagtattgttgtgatggccatctgctggaaactcctgaagagcattatgtattacagtgagcagttgtattgcctgtttggtgcccaatggttaagtcattgtcacttagctttatattgtcagtttgatatttattttaaattgtggaactagatgcataaattcacatttctgcctttcctttgcatcttctcatatattgtgtttttttttttttttcctagaaaaaatatttaaagcattgtttgacaggtagaaactcatgtatctgtagtccatgagttatatcctggctcagtggagtgatatttatgtattatttttacttttctctcagtgtcttatattaagattaacatgttgttaatagttgctttgttgattaatctctcttgttggtgttttaataaatgaaataggcttgcctttagatcgggtgctgatattgcctgtttcctagtaatgggctgatcaaatgatcagtggaattcttggtttgatgataaccttattaattgaaattttttactgatgtggctttaaaagaggtttattttgtatatgtttagaactctctgattttgatgaattatatgggaatgagaaacagaagaagtggtatttgctggcgagttaaataggcaaggtacccagtgataacaccaaccaaaccactcctatctgcatgattctgaacatctggatgcctgttgttttactgtgtatattttatttttaatatattaactttgtggattcatttaaggtctactcaaaagtaacactgtcaaaaccactaatatgtatgtaaaaattgtgctgtatactacaataaagttgttacttggatttgttcca

SEQ ID NO: 3464 - protein, 238 aa, Homo sapiens; identical to SEQ ID NO: 3462

SEQ ID NO: 3465 - DNA, 81410 bp, Mus musculus
  misc_feature (1)...(81410): n = A, C, G, or T/U
tatttgcacatgaattttataagttgaagtgccttaacttcactaaatagtttggtgaggaagcatttccttggcacttgtaccaataccccaaatatggaactttgaaaagacagctactgctaatttctgggaggatagaaacattttctttttttttttttcaaaatttttttttattatttaaatgcattttatatatcaaacattaatgagtatttggagaatcaaataatacttaaaaattttgttcaaattttgtattcatatcccttcataccctaaaaatatcattaatgaatatttaatagtatgcataactgaggatcctatatctaatgttgaatactaaattgttttcaaacataataaatattctttgggaattaagcataataaaagcgtaaaatattaaaaatgaatcactaacaaatatattcaaaagcccttatgataccacttgacatactgagaaagtacttaaaacacattatatatctatgttcattgtctaattataagtttacttttaaaagattatcagtgtttctaggagagaaattattttataagtatattttaaaaatttcaaaatagtaaaaactctttgaagttaagcattaagaaaatgctaatttcaagcacagtgagaaaaattatcattaatatttccatgatgtttgtagaacatgattttaatatatatgctagatccatttggttcataacttgttagtttcagtgtatctgtttagtttctgtttccatgatctgagcattgctgagagtggggtattgaagtttcccactattattgtgtggggtgcgatgtgtgctttaagcttttattaaagattcttttatgaatgtgggtgcccttccatttggaggatgaatgttcagaattaacagttcatcttggtagattttacccttgtccagtatgaagtgtccttccttatcccttttgataacttttggttgaaagttgaacttatttgatattagaatgggtcctccagcttgttttttggaatcatttgcttggaaaattattttccaatcttttactctgaggtagtgtctgtctttgtcactgaggtgtgtttcttgtatgcagcaaaatactgggtcctgtttacattggcagtctgttagtctctttttattgaggaattgagtccactgatgttgggatattaaggaatagtgattgttacttcctgttatttttgttgttagaggtggaattatgtttgtgtggctatcttcttttgggtttgttgaatgattgctttttttctaggttgtagtttacctccttgtgttgatgctttccatctattttcctttgtagggctggatttatggaaagatactgtgtaaatttggttgtcatggaatatcttggttcctctgtctatggtaattgagagttttgctgggtatagtagcctgggctggcatttgtgttctcttagggtttctatgacatctgcccaggatcttctagctttcatagtctctggtgagaagtctggtgtaattctgatatgtctgtctttgttacttgatctttttcccttactacttttaataacctttctttgtttagtgcattttggtgttttgatgattatgtgatgggaagagtttcttttttggtccagtgtatttcaagttctgtaggcttcttgtgtgttcatgggcatctctttctttgggttagggaagttttcttctataattttgttgaagatatttactggtcctttaagttgggaatctttgctctcttctacacctattatccttaggtttggtcttctcattgtgtcctggatttcctggatattttgggttaggagctttttgccttttgccttttctttgattgttgtatcaatgttttctatggtatcttctgcacctgagattctctcttctcttgtatcctgttgatgatgcttgcatctatgactcctgatctctttcctaagttttctaactccagggttgtctccctttgtgatttctttattgtttctatttccatttttagatcttggatggttttattcatttcctttgcctgtttgtgttttcctgtaattctttaagggatttttgtgtttcctctttaagggcttctagctgtttacctatgttctgtatttctttaagggagttatttacgtccttcttaaagaaggatgtaaactcatcatgagcatcatgagaattgatctaggtccagtgtggtgtatccaggacttgctatggtggaagaattgggttctgatgatgccaagtaaccttggtttctgttgcttatgttctcatgcttgcctcctgccatctgattacctttaatgctacctgccctagctatatctgactggagcctgtccttgggatcctggttgtgtcagaattcctcagagttcagctgtctctgggatcctgagatcctgggtgtgtcagagctcctgggagtcaagctgcctctgggaccccgagatcctagtgtgaccaagctcctaggatcctgggatcctgggcgtgttagagcacctgggagttgagtttcttctgtgttataggactggctacaagaggtcgcacccaaggtctgctcagggcactggcccagacaggacagaacctgtctcactggcctggtggagttcctgggtacctgggttctgttggtcccagttacttccggtgttggggcagatgttatgtcctcttcacctctgatcccgtggtcctgggcatgttggagtgcctgggagtagatcttcctctgggtgttgtgggactgactgaggagtttgcgtccaaagtccaaaatgttttaatttttgatagtgtgaagtgtataaattaggatattttgattcaaatgtcagttgtatgaaactatggcacctttacattaaaggtgccttcacactctagaccattatgtccagacttggcctggaagctgtccttttctaatgcatcatctacatgatttaattttgtattatttttacagagaagttatataattacattcttccactggtaactacaatgtaattaaataccttcctagttaagcagaatagaattactctgtcttcaacaactatctttctaagggatagacactattaaaagaacatttatctaataaaaatagaaataccttgaattacaaaatccttacataaatttccaagtttattaatttgttcgcttattttgtgcaagtgtatacatgagtaccttggtgcacgcatgaggtcagaagaagactttcaggatttcttcctttccacgttgttcctaggcaggctcaggctatcaggcttggcagcaagtgccttcacccagtgagccatctgactggtctgactggcccatgccgattctgttttaaaactatgctgaataacagcggtgcacgctggaaatgccaacagctgggaggctgaagcaggaagatagagttctaagccctgagttacacagatcctgccacaaaaaataataaaaaagaaaggaaaaatggatggaaacaaaaaatcagtctatacaatatccaagttcctcttatttcagtttactttggtaatgttccatttataagagcaaatcgtaagtgtttagtaacaaatatctgtgtggtagagtttacctcttacaaattgtacttctttacataaagtctactggggagatggagaaaacatttcaaactaagaatctgatgcgatctgtggttctcctgagaacgggtcacctgtcttctgccgtttaagaggtggttcttggtcattctctgtaacaaattcagaaaacccactttagagcacttttaacagttccatacacttttttagaaaagattttaggatttgtttttattctttcaatttgatacatactactatggatttattgttttaacagaacaagccttctatttgactaaaccacattccttgctaaaagttcaaatattctaagctaagtggcaagggggtcacaaacaaaatggctggaactagtttaatttccctacttacaaataaatgcacacttccaagaacacacacacacacacacaccataactcacaagctatgttaagggtagtatactccacacttcattgtgaagaactcacgtagactgaggctttggttcctgtagagtgtagcagtgggaatctggaaggtgatgcacagcatctccttgttaggggccacattccttacgagatgaactgaactactggtctccaaggaaacgcccagcacagcttccgcctgctgacgaacatccttagcaggatcgctatctttggagaagcagtaacagtgcactgtggggaggagctccgtgctgcaaggctgcccatccaaaagtgatctgaaaacactgagaaactctatggccttagctggcaagttcatgacaatgtggacagagggtttagcttcagctgacaatcctagccgaagcattaactcttctctgactggcccttggatgaagtcttttccatccatgttaaagactttcactttctggtcaactttattcagtttacaattgtgcaacagccatttatgggactcaggattgagatcattggcaaacactgtgcagtttttccttgctgctggaatggcaaagggcccaaccccagcaaaaacatcaaacaagacatctccagggttgagaagttcagtgatccggccatgttcagtagagagacgaggattccagtagactttagagaaatcaaactcatacgtgtagttgttttctcgaacctaaaaagggtttcatgtttttagttaatcgtactagatttaaagtctgtccactgaaactggataggttatgtacgcatgagagcatacatgtatcataggagcaaataacttcacttaaaaacattttgattagaatcctggtctttataccatttctgggaccagtatgtatcttgtattcaaccctttttcatgagaaaagtcagctctccaaagtaaaacagttgttcacattctaaagggtcttaaaactgattccaattcacataaggaattttgcagaaaggccaactaactggctttatgtcaccatgtagagaaagcaaacaacaggaaaaacagaacccttccacacatcaagcaagtggctctccacagcattcaggttgcaaaagggagacataattgaagcatcattagaatttgagatactcaatgttttgagacaattactaaaatcttgcccatttcatgtctataaattagacatatcaagtccctcgttttatgaataaagaatcaaagaccagaaagttcctaacttacacaaatctgatacctctttcttttgtttcctggggccttaatttcactgaggtacgtatcttccctctgactgaaaaggatgttcaggccagtgctggaaacgtaagtgccctaggcatagcctggcaggtgaagtgttttatgaatattttgcacactgttccatggcttattctgtcacctgtccatgggcaatttatttcaatacatagagctaaaaactttttaatgaaggactgtttcaatatatcattttagcagaattcaaccaaatcctcttatagtctctgtgagcataagttgctcagagtcgcacactacattgcagccatattatgaatatgtcctgtcctgattctaagcatcagtcctgctgttctcttggaattggtaaacagggcagtaccttggtcagcatattttcctctccacacagcacttccatttggaaatttcggtacgtattgtcaatgttgctggttttatttactgctgaggtgattcctgggtttttgtcaaccataacttggcctaaaaggtgaaaattcatgactgtgaaacgaaaactaaacaatttaacataaacgaattacattttcttttggtttacaaataaaaactgtactcggtatgtgtaattctacccacaattctaaaattaaagtacatacagaaaatttatggatatctttaaagcaaatttttgagggcttgtggtctattgtttttcctcattttctttaaacttattcaaatagaagcaaaagggtcgaccatatgaaactgacaatggaatgagaagctgtgaagaccctgacaacaaatggccccagaaacgctagaaagcgaagaaagccatatgcttgttctgctggcttcacaccaaaggtttcttttgctgtgggtctgaagcacatgcctacagtttagggatgtgtatcagcaagcaatgtttacagccaaggagacaaaggttcttcagaggctgacctaaattaaaaatgttcttctacttaaattggtcatttagtcaaacatttatcctagcagaaaggctacaaagacaataatatacatcagaaatgacttactgttaaaatctttaattaagtctctatctttttgtcaacacttggaaattttatagagatctatgttctcatttcataaagaaagaacttcatctttaagttagaaaaatgtactgaatataaatttgatgaaatacaatgagattatcagaattcagaatatgtaaaataatcaatggctgccttattgtgttctacttatcatatctgaactcaattaaaactttttgaagctatgaacctgttcccccaactcctcccagatgcactcgacttccctacccacccaactttgtgtcccatatattcatggatgggttgcctttcacttacttctaagacataaaagttagttttaaataaaattttaaaacattaaaagcatttctataattccataggaaagccgtagggctttggacttggtatggcagctgagctatgtccccagccagaaatgtttcacttttaacccttatgcaccaccaccattttaggagaaacatagttttaagttagggtattatatgaaagcccacatatgaccctgagctgagtccccactgtgcagtattaatgtcttttgtcaatgaagagagaggaagcagaagggcattatcaagtccaatcgatgcaaaatactgaatgctacattttaaagctgggaataattcccacatgttttgaaaattactgtattaaaaagagtaacctacagaatgcatgtataccaagtatttatataaaatgtgattttgattatccttctatccaaataataaaggctgtgggtttccctggagctacaatagtagggtgtacatagcagtttctaaaaggctaggagcacttaagaaagttttaaagtgtttaccataaagaagaggcttaattagctaaattactagctaagtcactagcattgtatatgtgactctgaaacaccaaatttcaaaaccttgtactgaccaatgtcccaaaggcctaatggctttttggaccaaaaggattttgttcaatataacaaaagtggttggagagagagagagagagagagagagagagagagagagagagtgtgtgtgtgtgtgtgtgtgtgtgtnnnnnnnnnnnnnnnnnnnntaagagtatgtgtgtgtgtgtgtgtgtgtaggcccaaaagtctctgccaacactatgactacaaagaagatattccaaaatgtttttcaaaaagggggaaggtgcttctgatttggtttcaaataaaaactaaactaccctgctttttttttttttaccctgtttctttaagttagcattttgaaataaaaaaattaagcactaaaactagaatgtcactttttttctagagtatgaatctgactgtaatccacctaccaattaaatgcttgaagggcagctggtgatctcggagattcaggtgtgcaatatgcccaaccctgctgaatccagaggttacatcttgaccttcaggaagcacagctttcaaaatttcttctgacttaaaattttcatatgttagttccaagttgtactgggataactgtgggctgacatcaagttcttttaaaactccgagttctgctttgtcaaaggaatcagcagtaagcatcctgtaggggtccaacatgatcagcctactgtcttcatccttgggatcctcaatcactcgctttatgcccgggcgctgcagggctactctcctgagggctcgcatcaatctgttgactacttctttcctcgctttaagcacagggatggacactgtcttcttaaaagctgttctatcaagttctctcattcctcgaacgtcagagggtggtgaaaataattcactatctctcacacttgcttctatttctggcatggttgagagtccttgtctttgacccaacaagaaaacagaaggcgctttcctaagtctcggcaccagggtaaacaacaatattgattcactggggtgacaccattccacttgcaaaagtcttcttgagaatccaaatagcttccatacgattctggggaaaataacaaaacaaaacaccaaacaccatcaagctacatgtgaacacattcacaatggcttttgaggatgaaaatataaattatctttcaagtcacctgccaagtgctgacaaaaggtttggatggcaagggagggcagtctctcttgcaggttagaatgatcactgtccctggtaaataatacatttgcattttcagtctatttgcccctataacagaaaaattagtggtctagcaatctccctatacccaaagaactctgctcacaaatttcgacagaatacacatagaataggaagtatgaaatttgagttaagggtcatctctaaatgaaatgatcactatatgtgatgccaccaatggtaatacttactgggatattcttaggagatcttattttatttattcaacgggctgttgtatcagaagctgtgttatgaagtttgtaagctaaggggtaagttaatcacccaaagttatgtggctgctaagtggcttggcaaggcttaaacgttcattaaggtcttaaaatgtagctcactggtagaaagcttgcctagcacgcatgaggtcctggggtcatccctaacagcacataatatcaggcatggtggtgcctacctgtaatctcagcatgaggaaataggaggattaaaagttcaaggccagcctgggatgcatttgagaccagacctcaaaaacaaacaaacaaacaaacaaacaaaaaaaaaaacaaaagcttggttaaaaatgacctgaaagctggggatacagtttagctagaagtgtacctagcaagcacaagcaaattcatgggctttcagcactacatagcctgggcacagtggtgcaggcactcagaaagcagatcagaaattaaagtcatcctccaggttggtctggatacatgagatttgtcccttcccatatgaccttagtatactgttaggatgtctatcatagtgtactgccatatgccatgcctataactaaaagcttcagtattttgacaaggctttactgtgttgtttgaagtaaatgtaggcgtccgttttccatctgtaatatgtggtttaaactatgaaaagatttttgtggtaatgggaacctaatcccggcacttctcatgctatccaatcctaccactgggtgcatcagccctcaccatgcatttgaccagccccctacccaagggctccggcctcggcttagcggccggtggacaaggagatgaatgacctggtggcctttttgcgctcattgggcaagaaagaagagcacgagtcccgccgcggtaccgtcaggttttctacatcacccgggacactactgccccctcaccagctgcacctttccagggccagcgtcacccgaggccggcttcagacccgaacccctcacctcatgctctggtgcagctcggaaatagggcgtcggaggctggtgacgtcatcactgctggccgcgaaggcagcgtagagtccgaccctgtggactcgcacctctcttccgggcccgcgatttgctacgagagcccggaagggccaagcccgtagctccgcctctgaagccgctcagccggggcgcttggggttaggggaagcggctccgtgatttacttagcagtcggtcgcggagcaccatgcaggcgtcccggcacagcatccaagcggagccaggctggtacgtctctgcccagcagccagaggaggcggtggctgcagacgagtggagtccgttgctaagcaacgtaagtgggctttactggctgcgctgggttcctgtgcgcttcggtatccttcagggcttgcaagaggagccttggactgcaggggactgaccctggggtggggcccgaaccactgaccccaggcgagtttggaatgtggcagcagcatggagcactcagtcaatagtgagaggcttggaacaccagcgggatgagcctcggttttgtgactcaccattgctttgtgtcattgtcgcctctgtctcctctagccttgtgaggtcttgcaagaacatcacacgatgtttcttttctggatttaatcatggggccaagggaaagatgagctataggcactttaatacacaagtccctgtaagtgaagatgaggagaggtctctggtaatgtgcacatagctcgtccttaacctaaagccggtgtagtgggctgtgtgtgcccgggggccccggagcctcttcggtcttgaatgtccagcctaggagggccttgggcatgctagaaaaactccctaactcagagctgctttccagtcctgccactccactttttatgaatccctggactgtaacagctgatggtttggtttatgttttccctgtaagatattcctgctaatcgacttaattcattaggcatataaacaaaaggttagtttattgcggtcctcgtacttgaggaagaagagttagggacagaagttccatgctgacactgggattcttcaggaagcacgtgactgaggcccgttcctcctctgtctccaccctatcttgatctcttgaagtcacaaggctgtggctcccactgaagccagctgggccctgcatgggaggaagtaattttcctggaagactcgtttccttgagttgcaccaataggtcagaatggagggaaaggaacaagtgttatgtccaaatgtgcttttccttggggtaataactcctatgacggaaagcaacttgggaagggaagggcttatttcatcttacagctacagtccgtcttgaaggaaagtcagggcaggaatctggaggcagaaactgaaacgggagacccggaggaaatattgacttgcccctactggcttgctcagtttgctctccttcatccccaggaaggcctgcctgctcagggatgcccccacctaaaacaggccgtgtcttggccagtctctttagggcattctcccaattgagatcccctcttctccaatgagactagcctgtgttacatgggcgaaagaactagccacgtcctggttaattagtgttcacacgattcctcaagtgtgtagaatggctcagcacactttaacttccttcctcaggcatttaatgtgggtaaatggtgtgtttccaggaacctcacaggcagggatcctccggtgcttcctttggtctctccgtctttaacgtgatgaacgccatcatgggaagcggcatccttggtttggcgtatgtgatggctaacacgggtatccttggatttaggtgaggcctgtttccatattttgtcatcacacggttccattttgataaggaattttgattccagaagttaccggtctacaatttctagttggattacttctggggttttaatgctgttttgttccccttgtgcctatctagttctgtgctttggaggaatgctccctacagtcatgcatggcttgagggggtgggcattcatgtaggaacctcaagaaaggaaccccggggctctaagatagcgtgggctttaaaacagcaccagcaaagcggggctctggtgtaagaatcagaacccaagggcttatagggcacaaaaaagaaagggaaggccactgagcattgtcccttttgggcaggttgttgctaggggaagctttggagataaggtaagtggttaggatgtcatgtgatagataagcagctttcctggtcagacatgactggggtccatagggcacagtgggtaaggatctagaaaacaagttactttaggaattgttattgtttaactaaaagggggagagggtaccaagtggagtagccatggctaatagttctgaagtgcggcaatgctttttcgttcctgggtgatccttatagagtatacttaaacaaacctagatggtaaaaccttctacacatctatacagtattgcctgttgctcataggctaaaaaaatcacctaatatagtgcagtccacgtgctagtatagtaaatgccgcagcagttgtaatgtaatcgtacttgtttatcaacacatgcaaaaaagatccagtgaaagaagaaacctgttcctggattggacgtcgtgctgagaggaactggagaagtcgttttaagggccttgtgttttgtttttcaatgttttgattcttgttataatagcctaaaaaacaaatacaccatataccatataaaacttttctttctatatgtccttattacataagctttttaaatttaatctactcttattctcgtattttccttttccaactttttctttaaaactcagacataagcacacttactacccgagagccaggatcagtttacacaccttgctcatggggaggtgtttcgggagcaggacacagctgcagcctccttgcctgtgacaacaaagccttttctgaagcccctgaaggactggtcctggtagttgggaggtagagacaggaagatcggggaattcagggtcttcctcagccatataagttcaagtgagaccctgcttcaaaaaacaaacaaaccaacagccacaacaataaaaaaagtgtgccctaaaatcatgattttttaaaagaatacagtatgatagtataataaatacaggaaccgaggattgtattacttcttcttagtggatattcagtactagatgtaaaagcacgtgttgcgttcatgattatatgattggcaatgcagtagtctgctttccccagcttcaccgtgagcatgaataatgtgttccctatgacacgaggacagccatgttgtctctgagacttcattgttaacccagatatcactgtgcaatacaggactgatgttgatttttattaatctaaaaatgtggctaatctaaaaaaaaaaaaaaaccactttgtattagtcagggttctctagagtcacaaaacttatggacagtctctagatagtaaaggaatttattgatgacttacagtcggcagcccaattcccaacaatggttcagtcgcagctgtgaatggaagtccaaggatctagcagttactcagtctcacgcagcaagcaggcgaaggagcaagagcaagagctagactcccttcttccaatgtccttatattgtctccagcagaaggtggagcccagattaaaggtgtgttccttaaactcggagattcaatcttctggaatccatagccactatggctcaagatcttcaaaccaagatccagataaggatctccaagcctccagataagggtcactgctgagccttccaattccggattgtagtttattccaaatattgtcaagttgacaaccaggaatagccactacacacttgatctacaattgatttatgattttaaaaagttcaagctcatttgtgtcaggctggccaatgtgaatcaaaacttatcagtcaggcaagttaaaagcaatttttttaggtgcaaataaaatatccttctcctgtcttaggctgctaaataagacttctttaacgcctggagcccaacattatgttctgggcttatttatttcaagagttagtcatgggccagtgtcttagtactgttctattgctgtgactacacagcatgaccaaggcagcttatagaagaaagcactttaaatgggggcttgcttacagtgtcagagggtaagcattgtcatcatgctggtcagggtagctggggagtgtggtaggctgcagacaggcaggcatggcaccgagcagtagctgggagcatacattcctgatcacctgcaggaggcactgaacaagcaatacctccaaacctttcctgatttggtcacccgctgctaatcaagcattcagtgagcctggtgtgagcctgtgagggctgttttcatgaatcacagccagtcacggggctgctgttgttcacatagctttgtatgttcgatgctttactgccgtcgctggcttccatggctggtgtccatctcactggccgcagacatgaaatccttcagacccagatctctgagcatcgagcaccgggtcctggcgcctgtttagttagtagaagccaacttaaagtgcaaaatctcacttcagtttcttctctttcttccaaatgtcttaataagcaaaaccgcttctaagtagcccactctgctttcgttggtgtcgtcacactgtaattttgtgaggtctctgatgtcggtttcctgaatgcttgctacttaccagtaagtctttagtgcctcacagagaggatttctgtgcctttgctatggtgcactagggacctgggtttgctagaagcctaccttgccaggatctttcggagaataagcaggaattacttatgccatttattttcgcagcgtttacacgggtttttagattgtatccttagaaatgtgttacttgcgttgttcgggggttgagctgggaagaactgcatgctccatagagtctaggaatcgtcaggtcgacagtacaggcaaagccatggttacagggcccacatagagcctaggaatcatcagctcgacagtacaggcaaagccatggttacagggcccacatcactggaaggagagggagttggggaaatggggcaagaggaagtcattgagacttagaagaggaaaattagtcactaaagggaaatatttaaatcactgagtgctgaaatgcagtcagcagacagtgcaaagtgagggacttgtgttttaagtaaagtttctttctttctgacttcacttttcattttaaaagcatttcatttgacttaagtacaagtcggtaaatacagaacagtgatttctttgatgtctgcagttttgcttctcagagacggtccctacaagcatctgactgaagaaatgacggatcatgaaaaagcaagcttggaggaaacctaacggtgttgttttatgttttagtttcctgctgctgtttgttgctctcctggcttcttactcagtccatctcctgcttgccatgtgcatccacaccggtgagtaacaccatgctgctcacttgacccagcctcgtgcataagaaatgaatgtctcccctctgatgtgtgagagtcaaacgaaagcatacgtatttagcaagcacaaacaggccccaggcttggaactccagcaccaacacgccccaagcgtctggtttccaatgagcatatatcattaatggtgtggtgattggttttgttttcttgtgttaaggacaaaagctgccattgtttgtttgttgttgggttttgttttgtttccccaagaccgggtttctgtttgtagtcctagctgtagaacttgctcagtagaccaggctggcctcaagctcagacccatctgcctctgcctcctgagtggtggaatcaaaggtgtgccaccacctcccagagaaagctggtgttttgatcacctgctctctcttagctttgaattaaatttgtgttgcagtccaacactagcttcacctctgcaaggtggaactctctttgttctcactggttttgtggctttcagacttacagaggcagcattcatgctccaaatagattttgttgttgtttgtttgtttgtttgttgggttttttgagtcaggatttctctgtgtagtcctggctgtcatggaactcactctgtagaccaggctggcctcaaactcagaaatccgcctacctctgcctcccaagtgctgggattaaaggcgtgcaccaccacagcccagccaaatagatttttttaaagtgggattattctagggcccaaacaaatgagaaccataaaggtattgttttgagattttgagactcttgagagcagagttctaaaacaaccattccactttattttccttgtctgtgggtcagaaaagcctcttttgttgtgtttgatggacagatttagtaacaaatcacctaggtgattcttacgaaaaaaccaatttaggatccagagtttagagctgcagcttctaccagtagctgggtggtgttgacaggcaggctgaccaatgctttcctctgccttcagggcaaatgtacaaactgattaaaaaaaaaaacatagaaggcagtgtaaggtggctgttatcacagcttgttactgtgaactcaggaataataatacctttaaatagcatttataaggcctgccaggaatatcagtcacacaatttcccttcttcacatggaaaaggttctttaaatcaggatacttcctctagcattgtaatagattcttttgatacctgctgttaaaaaatgaagacttgactcaactgtgcagcagtcagttttagtgtaattattcgggactagtatttaaatggatagaattttaaaagtaatattaattttatccttcagagcatttaacctcaatatcctgacactgttgttaactatgggacacacgaagtgagaacacctgtttctctttccttttcctcttttcttctctgtagcttgcttgggtcctgaactaacctctccacggctctccactcacactgctgccctgtctacaccgactgctcagtccctgtaaggcgctcgctcagtggaggtatgctctctcttgtgctcctgtgactgcagaatggtgtgtggttatctccccctctgttggaaaaggggtattatgttcacgttagaatcactggtcagaaaaaaaagagttaaaatctttctaaaagataatgtttttgttttggttggttagttggcttttgtctagagttaaaaggtgaagagaaaacttcatgggtacaaaaggataggatcttttcacatgaaattgttttacttgaaattataagcagcattgcattttgtctgtgggggcttgggaacggaggaggcacgtcaaggtgccaatgcccccagccttacttcattgactgtgcaatggtcttgacaacactttcctcctaggattgttctgagaatgaagcaaaaccatgaatagaagatataagaatgggatgaatagtgagctctttgggaaagaatctcaaagaactgcacagtcttatacatgatgtaatctcagaagcactggctgctggtcgttgtgtgaaaacacagcttatgctctgggattagaacaattgccctccctcctctggcctccacatcaccatcagcagatgggacccagtgttctggggcagtgtactgcttctggctcctcctcccccactgcagcactgcacactgtgcattgtgcactacatcatggccattgtgcgccttcagagccactagtttaatggtagtgcagtgtttatcttacgtcagtaacttcaggaatctcgtttatctccatcccccagactctgacccatgggttcactgtctattctatggcctcatcttttactgttttccaactccccaaaccccagatcatggtacatagcactggggcagtagatgagcccttacatccagatctgtaggcagcaggaaggaagaaagctagaaggggcctggtgtgggctttgtctcttagtgcataccttctccaacaagaccacaccctctaatattttccaaagaatttcaccaactggaaaccaaacattcaaatagtgaccctatgggggcattctcattcaaactagcgtggtacctctggttggcctaaaaagaaactttcttatttatttatgaattttatgtatgtaggtgctttgttgtatgtatgtctgcataccacaagaaggcattagatcataagctgtgatgtttttgcttagaattgaactcagaacctctggaagaatagccagtattcttaagtgctgagtcatctctccagacaagcctggaacttcctatgtagtccagactggcctcatattgacagagtttcacctgttctgcctcctaagtgttgagattaaaggcatgccctgacatgccctgctctcaggtactttcttatgtgcagtgaaaacccaaacctctttaagaacaacatttattaagttgattgtgtgctccacatctgtaacctaacaactgcatcagctagatttttgtcatctgtattagaggctagcaaaaggaaacagtaaaagatgaagtggattcctgcaggctgcatagtcagttggctggttagaactaatcttgcatgtcatagcatgtcgtaccaagaggtacatagtctgtgccacttcccaccatgcaaaccttgaagcttaattctggattctgcatttgactctgggtcatccttctggaggtagagctcaagtgagactgcgcaggctgaggaagaggcacattagcagaaggctggcatggccatctcctctcacatcgattgcaggatgctttgtatagaatttgttctgcccaaaataaaatacctccagctacaaacaactggggggtgggggagctttcgagaaagccatggcttcttcctgtgactaagcctgttagtcagaagtcgagcttccatttatcctttgagtgcctcacagtttgtcaacagagagctccgtggtgcgagacagttcagagaatgatctgtgctaaaacaaccacaaaagaaatacagaaacaacagtgagatgccttcgtaaatatgcgcaaatgacagatccaagtcagtgtcccaacagatgctaggaaggctgggacaagaggaaccgacttctcaggcaccctggaaggagaccagcaggcctttgtggttgtttattcttataaaaccatacttgtaccacagggtctggcaagcttactcctcttggcatttatccaaagacttaggtctacacaaaacttacatatgcgatgtttatagcagttgtatttataaattgccaaatttagggagtgcccaaatacccttcagtagatgaatgcccaagcgaacagtgacattgaaacaacacaaaattattttgtactaataagaaatgaagcatcaggccctgaagcggcatggaggcctcataaaagcaaattatcaggtgaaagaaaccatatgctgcaagagccctgcttgcaggtgtgcatacacagagtgaagccagcctctgtgtgtgtgtgtggggagggtataatctatgcccattgtagtggcgttactcacaatggtgaaacatagaaacaccctgcatgcctttcagttgaagaatataggtaaagaagcgctgatctctatgtattttgtttggaatattatcctgcctttaaaaacgggctaaaaagggggcatcttcccagtgacaggagcagagaggagcctggcagacatcatgataacgatgaagtgagataaggcagacaggaagaaaaccgtgtgttctcacatgtggacactaacaagagcagttaagaagcaggatgagactgtttgacagggatactggccggggtggggtgggggagatggggagttcctgattgaggctacacaggatgcggagtctggaaatatgatgcacagcatgctggtcgtggtgaatatcaaggttactggaaatttgccaagagaataaagaggggcagaaggggggggaggttgagtggatatgattatttctttgaatatcatagtttcaatgtatatcaaaacacgttgagcactttagatatacataattaagcgaaagaagagaccaaccagaaaagattgtgtatgatttggtctcagctctatgatcttaaaggaaggcaaaaccatgaagagtaaaggagtcagcggttagcaggggttaggagggaaagatgattgaacaggagacgatttagggcagagggaaggtgtcacgtgacagcatagtggtggatatgcactcatcaagatccgtagactgtctgtctagtgccaaaggggaaccttcatagcaactgtggattggttttgtatgatgttgacaggccagagctccttgataataacagatgtaccattgtatagctggaaggtagcgttgtatgcgggcagacggtgtatcacagccttacactttattaattttgctgagaccctacaaacaatctaaaaatataatctgttacagaaaagcaaatggtgagagaaaataattcaggaacaacatgaagagtagaaatgagtaataaaagcccacaaggcctcattcctacataaagaactacaggcaactaaggaattcggagagggagaaataagtcttccccaacgaagaacacaccagttgattatccaataccaaatggtcagccgcaaacattcactaaagcatcattatataagttgagaagattgaatttatgtatttaaaaacatatatgtatatgcatataccatatgagtatgtaacaacaataaatgggggaagaggccatgagtttgaacaagaaggggtagatgagagggaggaaaggaaggtgtcttagtcagggtttctattcctgcacaaacatcatgaccaagaagcaagttggggggtttattcggcttacacttccatactgttgttcatcaccacggaagtcaggactggaactcaagcaggtcaggaagcaggagctgatgcagaggccatggagggatgttccttactggcttgcttcccctggcttgctctcctgctattttatagaaccaagactaccagcccagagatggtcccacccacaaggggcctttcccccttgatcactaattgagaaaatgccttacagttggatctcatggaggcatttccccaactgaagctcctttctctgtgataactccagctgtgtcaagttgacacaaaactagccagtacaaaagggatggggaagtgatgttgctaactataatagcaaggaaaaaaatagttcttaaaaaggaacagcaaacaagggtctcttctaatctaggataaaaacatgtaaaataataaataatgcatctgtaaaataacaagaaaataatatcaaaaggtatccagaaaccacaagtgccacagaagttagagaaaacaagaaaaaaaaaaaaaagggaagaggagagaagagaaggaaggaaagagaaaataaaataaaataattacttttgtagtcggattggaacacttaatttccagggattctcacagaaagaataaacagcttgaaaatgagagaagagattactaccataccaccttgaatgtgcccagttttcacctgaaaatgaaagaaaaaaaattaaaaagttagagcagtccaggagaccagcatgcaagtgatagaacgtgcacagaaggggataaatggaaaggcagggaattatcaacagaataacacagaagagctggtgtaacagcttccacaataacatattctttctagaagatcattgtgaaataattcacaccaattgtattgtaaatgatgggaaagccagttttaaaagatggtatcttaaaagtttacacagaagagacaaataaacagggaagtggctgttggttagaagtgcctcttatgaaagcctggaccatagcaccctggtggctgtagctgccagcctgtccaaaaagaccaggctccagcttcggcagaaagtgcctccaaggaaagaggcagatggctctaggggaggatcctcagcagtttcatctgccttccacatgcagtgtgtgcatccatggggaggtgtgtgcacccacggagaggtgtgagcgcgcgacatacacacacctcatatacacaaacaagaaagtaaaaatcaagacacagtaacagtttttacaggagctgtaaagtggactgtatatcagtctttctgcaattcttggaaaagatgcttgtaaactagaattccatagccagccaaactcctgggaacgtggtttcagtaatgacatttcatacatgcaatgtctgagaaacaatccctccagtatcttacataataagcagtttaagagtgaaggatgctcgccagaattcaggagtaacagaaatgaggaatcgggagagaaggaaaggaaactcccaggacagcagatccaagcaccggtgcgcgtttcacagaagcatagcgctgctgccacgccattctgcactcagcatcctttgcagggtggcagctctaatttccaccatctgaccttgagtagagagaggtaggtaggtacagaagtctcagggatggaatcaaggcaggcagtgtgcagagccagcacaggagtgacggccaagtgctagtaaagacgaaggagccatggtttgggccttgtgggccactgggcaaggccactagtggaacacagaaggcagaggtgactcgagattaaaagtaagttcagtttcgaatatatggactttgaagtatgtgtgggtggaatggtctgagctctgaagcataggatagaggttcattgcttcggtgttctttatctgttagagtaagggaataatcagagacaagtgcatgagcagatgttcatgctgtagtgtgcctaacatggggactaggtgagaagtctgggcaagtgaggaggaaagcgcgggtaccgttggagggacgggagttagagaatattcctagatcactgggctgaaaaagctagcagacacaaaagcatatcctgagcattatacgcaatgcacccaaagtaactgaccactgctgttgagcaaggtgtaaaggacaaaattggagggaagatcctgaagactatataaggatttgcctagggaacgagaacccactaggattattgaaaaagtccaggtagagaacagaatctgccacttgctctgtccaaagagaattttggctcttttagaacgcatgatatagcctgtaactccaataaagagttttgagtccatttctcttcctcttcctaaagaaggtcactggaggtgcgtgtgcacatatatgtgcggaggccagaggccaacagtgggtgtgttcttcactctccctctagtttttaaggcggggtctcatggaacctggagctcaccagcttcacaactggcggctgagcccagtgaacaaactctgagaatccacctgtcctgcaagtgctgcagctgcaggcactagaccctatggcaagcttttgtgggtgctgggaatccaaactcaggcctcactgcttgaggggcaggcactttagctgaaccagctccctggccccaaggttatcattctccatgatgacctgaaactccactcatgatgaaaaaaagatttttctataagctctggtttcttcttttttaaaaaaagtaatttcatttatttatttgtttgtttattcactgtacattggtgtctatgtgagcgtgtcagatctcctggaactggaattacagacagttgtgaactgctgtgtaggtgctgggaattgaacccaggtcctttttgaagagcaaccagtgcttttagctgctgagccatttcccagccccttttgcttgttttaaagcagaaggcttttaatcaatgattggcagccctggcctggactttactttctaggtcgggctaacttgctacctgaagtgaccctcctgatgggtggggtttaggagtgtactaccacacccaagtaacatcttaaccaggtatttcccagctgctgctgctgtctgctatgaaattgcctccctgacaggctgcatactgcccttccaaggacagccacatttctggaacctgtgagtgtcatgtcaaaagaagagtccctttacagaagggacgaaggatgttgaaatggagaattgtcttgacagactctaaatttggttacatgtgtcatgaaaggaagatcacagacaagagagaagtgcagagtggccacacagatcacaggcacttgaccacaaatcctggagccaccagaagctgaaaaaggctagtaatggattctctccagaaggggggactcaagttggcacccagattacgacccagcgaatctaattttgaacttctctgtcctaaactgtgaagcaataattttctgttttttcaagccaccaagtttgtgataattggttacatcagccatagtgaactaaaccttgcttatagtaagaaaatgccacaacattttgataacaaagaacatacaccagtgtgatttttttttcctttagaaacaagtttttggtaaagttccaaatgtagtgttaagagtgtttcctgcgtttgtatgctaattgacttcctgggagctatgtttatatccaaaccgctagccattgttttcatagcatctaccatgtccttgccccaggaggacatccaatgaaagctggagataggcgagaattgtgtggaagcattagaactgtggagagatcacatttccctgttaacatttaacatgcatggcaaaagtccggccagccgcagaggcaagtgcctgtaatcccactctcggaagactgagtcaggaggatcaagagttcaaagtcagcctgcagactgagatcctgaatcaaaagaactcaatgacaagtagtcaaaacaacctttaaaatgtccttatgtagaagatgagttctatatgtttaacatcaacatagcatttccaagaaaactgacacctggggcttcttggatttccttttgcccagccttggtctgggtgtcctgggagggttttaaatcacgtttaggtcacaatgaattccatttgggatgtgagagactcagaactagaactaaaactaaaagcgatgacaccagggtgtgtttcatgcaaacatcactctctgcaaacacttgctgattaggaaatgtagtcaggcaccgtgctgtaatatcctctatttctttttagaattgtgagcataatttaatgcactcaggattattaactgagtgaataggttaattgaggcagtttcagtggattagtgtttttgtgtcttgctttatattactgattcttctttggttttttgagacagggtttctctgtatagctctggctgtcctggaactcactttgtagaccaggctgacctcgaactcagaaatctgcctgcctctgcctcccgagtgctgggatcaaaggcgtgcgccaccacgcctggctatattactgattcttgactgggtgtgatttctcccccagagcatctggcagtggctatagacatttctggttctcatgaccagggatgggatggatggacatggtgctattggccaccagtgtgttaaggccagggatcctgttgaacatcccacagtacacagacagctctatctgatagagagctacatggtcatgagcagccctgggctagattgtgtgtacgatgtgtgtgtatgatctgctcatcattttacctaacgttagagtaagaactttctttgcagaagctaagctttctgcttttaggtagggaagaatggctgtgaggtcctgaagcattcctttttattgatggtgagtatgcatgtgtgtgtgttgagtatggatgtgtgtagcatggtacatgcatacaggtctgagaacaacttcatggttttctcctctcagctttacatgggtgccagggagggaataccctctgaaccttctcactcttcctcattgttgtcttaatcagaaacttacatgcttgagtctggaggaagggctcaggagttaagaccactggctgctcttgtagaggatctgggttcaattcctagcacaacacagggtgggaattcagttcaagggaatctgatgccctgttttggtctctgcaggcaccaggcatgatcacagtgcactgacagatgtgcaggaaaaacttcatacacataaaataaagcttttgttgttgttttgagacaggatctctttatgtagcccctggctgtcctggaactcactatatagactgctctagcctcttaattcacagaaatccatctgtctcttcctttcaagtgctgtgattaaagatgtgcacccccatgcttggcctatagaccccagtatatacttataagtgtgaggccatgcagtcttatgagattcttctgttggcagttgccttttcatgtttaaattataatctcctatttattaagggcttttttctcacactcttcattgtaagcagtaaggacttagctcagatgggccatatttccccttgcctctcttgatttccatttctactcagtaggtcatcactgatcatttcatgtataactgcagaatatacagaaccttggtttagtttccattggctggaaagctcttttcagctcctgtctctccttcccatagagcatgttcttctcttatgccagcggtcctcaaccttcctaacactgagaccctttaatatagtgccttagtcagggtttctattcctgcacaaacatcatgaccaagaagcaagttggggaggaaagggtttattcgttttatatttccacattgctgttcatcacttaaaaaaaaaagtcaggactggaactcaagcaggtcaggaagtgggagctgatgcagaggccatggagggatgttacttactggcttgctttctctgccttactcagcttgctctcttatagaaccaggactaccagcctagagatggtcctacccatcaggggccttcccaccttgatcactaattgagaaaatgccttacagctggatctcatggaggcatctccccaactgaagctcctttctctgtgataactccagcctgggtcaagttgacacacaaaaccagtcagtatatacagttcctcatgtcctggtgactccaaccataaaattatgttcattgctacttcatgactgtaattttgatattattatgaactgtgatgtaaatatttttggagataaaagtttgtcaaaggggtcacaatccacagattgagaactgctgccttacactgtccaagatagcatttgttttgtattttgtgatgattcctaaagtattcatattatctgtagattgaatttaatgggcgaaaaccagtgcgcctgttaataggctgtgactgtaaatattcctcactgcacagcaaactagtcaagtgggaatccagaaccttcctatgcatgcagtatttcagcctctcttggcaactgaaagaatgccttagtaccctgtcattctgttttcttttaattgcatggaaagattgttagtcatgtcataaccagttggcacagtgacactgaagtttatattaagaaagatcagaagtagtcttaaaactagtgaatattcaagaactttattgccctctatacactgttagggaaaaaaaagcaagaagaaaatgatggaaaacagaagaaagaaaagaatttcagaataataagagtactttccaaatggccaactttctgagagttgaactatgtttggataacttgtgtccctcaatccagatccaaagataatattgcttctgctgaaacttgggctcataccgtaaccagagtttattaattgtcctatttcattgaggaaaaaatgcaaagcagacaggctctggagtaactagctggaagtgctccactgcctcgtgggaagcagctttccagggatgactgtggaggccagagccgtgggcctgatgggcgttaaggaaaaagtcctcgtgtactggagaagactcacagcctctccattcctccaaaacacagcactgattgcttttcatataaaaaaaatgatttctaaaaacacactgctagtgattgtttcagctcataggaaggtttgctccaagggctacttgtagaggcctgcattaattatatattatgatgtcattcctattctgtaggactatgccactctctcattggttatcaacacttagttttgtgtctctgaaacatcttcttaatgtttgtaatgctgtaaaatgtatgaaggaaccaaaaacaaacaagcaaacaaacaaacaaacaaacaaaaaattcctttgcttgtaaatcaagcagcaaattacttggcactagaaaaataaatagaatttcagtttaactgccaactctcaggtttctagaggaagtggaactatttcagttttgttgggtttttgttgtgaagcagcttagggggtcttgctgtgttgctcacctgctttcaaattcttattctcaagtgatcctcctgcctcagcctcacaagtaactggcattccaggcctgtgccaatacacttgacattgcagttcttaaaaacaaagttccgcctttgctgtacaagtcattataacatatttgagctcctttcctcaaaaatgcggaaagccaaaaaaagtgactactttctcactgtttacgtgtctacttcatggattgtatttgaatcctggttttctttttcccaattaaaataatatgggcattttcttgttattataaatgggctttcatggttgtattattttattagttatcagtaccatgatttacttaagcaccttgttgcacgtttcggttagccctgtgtttccagtgtaaatcatggcatgattaaatatctagtgaggtccctggttttattcttatctcctaggaccaaatctcccagggtcaaatttaaagggtggccgtcgtcgttcagactgcatcccgaccatcactccagtctctgactctcaccagcatgtagaaacagcccaagccacagaagagagcttggaaattgcttcccagtgctctttggttcactggctaagatgtggagaaagcacttggctggctgtgtccgaatttcattttcacaaagcctcaaagcaaagccaaaagccattattcatattcctgatgtctcaggcaggggaaagtgcttctaatttttgcaacataaaagaggccctgatgacagtgacagagctgagcaggacccagacctgctgacgggaaagctagatttagggctggagcactggacccacccccagctaaaagcccagtgcctttcctctttcggtttgggactttgtgatgcttagagatattttatgacactgaagaaatagtagaaccagagggcaagtttgagattgcacaacttcacaagctgcagctaaaactgtcttcattaagcggttatattcgctgtgttttctggcacaagcaatctggttggattttaacttttaaaatttagaattaatgtttactgtttaaatttgatattgaaatacctgctccctttagagtttttcagtgtgtttttttttgttttgtttgtttgtttttgctaattggtatttgttttccctgcttcccagatacacaaacaattaattactttccactgcttaaatataaaacaaggctggcatgtagaacatctatgtagcatgtaaaaggcttgaatccagtaccctacacaaacatgaagcagacagacatttgtttacgtactgacaaacaaatacaaaagaggtcatttgaaaagcaatgacactggaagtctgacactggaaaacctcattgctttaagtccttaaaagaaatgtttttcttatttattttcattttaaaacatggtctggtgtgatttttcagttgccatattagatctgttcagattaacatgcatatatgctcctttgacatgatattataagggaattaatgagctgtttaactattttatttatgagaagaaaagaattttggtttcaaaagaacttgaccctaggggaaagattgattatctcctagggaatatgaaagtgaattttagtagaagtcatcttgaggtagagcatttgaaacaatgtacttcaaatgctcagatcacgatagagggctaatatccaatatatacgaagaactcaagaagctagactccagagaaccaaataaccctatttaaaaaatagggcgcaggccgggcgtggtgacgcacacctttaatcccagcacttgggaggcagaaacaggtggatttctgagtttgaggccagcctggtctacaaagtaagttccaggacagccgggactatacagagaaaccctgtctcaaaaaaaccaaaaaaaaaaaaaaaaaaaaatagggtgcagagctaaacaaagaattctcaactgaggaataccaaatggctgagaaacacctaagaaaatgttcaacatccttagtcatcagggaattgcaaatcaaaacaaccctgagattctacttcatatcagtcagaatggctaagattaaaaactcaggtgacagcagatgctggcaaggatgtggagaaagaggaacagtcctccaatgctggtgggattgcaagctggtacaaccactctgaaaatcagtttggcggttcctcagaaaatcagacatagtacctgaggatccagcaataccactcctgggcatatacccagaagatgctccaacgtgtaagaaggacacatgctccactatgttcatagcagccttatttataatagccagaagttggaaagaacccagacatctctcaacagaggaatggatagagaaaatgtggtacatttacacaatggagtactatgcagctattaaaaacaatgcatttatgaaattcttaggcaaatggatggatctagaggatatcatcctgagtgatgaaacccaatcacaaaagaacacacatgatatgcactcactgagaagtggttattagcccagaaacctagaatacccaagatacaattcacaaaacacatgaaactcaagaagaaggaagaccaaagtgtggatacttcaatccctcttaaaagggagaacaaaatacccatggaacggggctggtgagatggctcagtgggtaagagcacccgactgctcttccgaaggtccagagttcaaatcccagcaaccacatggtggctcacaaccatccgtaacaagatctgactccctcttctggtgtgtctgaagacagtgtatttatatataataaataaataaatctttaaaaaaaaaaatacccatggaaggagttatagagacaaagtgtggagcagagacttgaaggaatgaccacatagagactgccccacctggggatccatcccatatacaatcaccaaacccagacacaattgtggataccaacaagcatttgctgacaggagcctgatatagctgtctcttgagaggttctgtcagtgtctgacaaatacagaagtgtatgctcacagtcatccattggactgagcacagggtccccaatgaaggaactggaaaaagtacctaaggatctgaaggggtttgtagccccataggaggaacatcaatatgaactaaccagtacccctagtccctgggactaaaccaccaaccaaagaaaaccacatggtgggactcatggctctagctacagatgtagcagaggatggcctagtcggtcatcagtgggaggagaggtccttggtcctgtgaaggttctatgccccagtgtagaggaatgccagggccaggaacaaggagtggatgggttggtgagcagggggaagggatagggggttttcagaggtgaaaccaggaaagagataacatttgaaatgtaaataaagaaaatatctaattagaagaagaagaagaagaagaagaagaagaagaagaagaagaagaagaagaagagaaaagaagaggaagaagaagaagagaaaagaagaggaagaagaagaagaaaagaagaagaggaagaagaagaagaagaaaagaaggaggaggaggaggaagaagaagaataagaataaatgatgctcggatcatcacaagaatgctgcagtcataaaaactgggtttttactgcctgcatctcctcggccctccctgtactctcattttgtctttctaagtttgtctcactatatgcatcactacaattatcttgtttaattctatttaatttagcttaagtttacatagatgatagtattgcgtatttatggaatgttgatgaattcattgaatatgcagtttaagctcacagctgtatctaataagatgtaagtgtggccatcattgagaaagacagaaaccgtgaccggcattgctgatgagtcaccattatgtctgactagacagtgactaaagggggaaaggctcagagaatgggggtgtttatcattggaaaaccaggaatttgtttttcaagtagtaaggcatttaggtcaggtaatttttataaagtgatttaaaaaaaaacaaaaaacggacaacatagaaatgtttttcttaagcagtaatggaagtctggagccatggggcgtaggttcctgtcaacctgccagaaacaggggctgtcagcccagttttcttaacgtttaagagaccacacctcaggtttggtctttggtctctctacagaaaagaatttctgttcaaaccagtatgaaccagagttggagtttattaaatgacatttttaatataaactttgagcacaaggttgagagaaagaggctgctatgaaacatggcacacctgagcgagagtgtgggcttccctaggcctgtgtgaccttcataactgtgtgaccttcataactggcctacccagataaagtatatcttcagtactaaactgtatatgtatgctatgtttaacaattcaaatgtaaatgcatttttaaaactagatatatcactcaaaaaagattccaagtcccttgaaccttgataatagattgtaaaaaatacccttttattattcagtattccactgttttcttcctggttcagagttactatatggaatccacctatgatttttaaaatgtttgtttttatgtatgtgaatattcttcattctaaacatacaaaaggattttttgtttttgttcccaagtggcagttggaaaaagcccacatatgtccaaagagatgcactaaaactggctttaactagtccgtgactaacagaaagtatatatggctctcccaagcctagtgtctcccagcctgcttctcctcactgtaagtgctatgggcttatgcacttcctggactagagagcctcatgaactgggtagaacacaggctgtctgggcagaatgtaacgtgactctcttacaagccttctcattttcctctgtatttaataaccacacttcttgaacacaatgaaatgagaatgtaatttaacactcttatgatgagaaaagaaaatatgtgccccacttcccaactgtaggataaaggcactgttactattgtgaacacattatcttcaatctaagctcttggaaaggcagatgtccctgaaattgtggcacacctgtcatacctcatgtccaatatctagaaattcttgctggtgacaatttctgtttggatagtgtgtatccaagtacttgagtcctgtatatgcaaacaaggtgatcccaaggaatcaggccactgaattcacgtaggctgagaagtctggacttgtaacatctccctattgtagtagactctggctttacagagcatgaacctttaaaggttttccccaaagttagtaccgctgctctatccatgattgtaaggtggctagaccccagccgctagatctcagttaccactggacagtttttcctgcttttggtatttcagaacatttaagagaatcccaggtctcccctagatggcctacaagatgagagctaccagatgcctctcagttggttacagtattagtgtgctgacattgcttttttttttttaccatagttagaaacttagtaagaatataaaataaccattaatatggacatttaagaaacagaatcagtatgtgagatacactagagaagtataataaaatgaatccttagggaatctaaaaacaaaaacaaaaccaagctgtgtgtgtgtgagtgtttcccctgcatgtgtctctgtgtgccatatgtctctgtgccctcagaggctggaagagatcaccagatcccctgaacctggagttacagagctgtgagctacagacccatcactatttgtcaaagacaaattctgcaaaaaacacctaaatcttgggcacatgggtggcatttagagtggaaattaacttttcaaaaagaaaactctcaaaggccttgcaagaagcagctaggccttcctccttcctctaccttcatccaggaggtccaagcgacccctagtccccactggctgaagccgggagtggcactgtgcctagcctaagagaagtaaccttcccaaatagtttgtgtaaaataacaattgtactttgtcgtgacagccgtgacgtcttacgaagatctgggactcttcgcttttggattacctggaaaggtaatttcactctcccctcagtgtgtctagagcctaagcagcatttctcttctgcttcatgttcagaaagacatatatatatgagaaggaccttaagagattgagaggaaacgaaagtaggaagagacggaacggtgggaactgaaaatatggaaacatctgtggtccttccgaagcccgtctctaaaccagttcagttctaagtcttgctgcccacctgatgaactgcagagtagtaatgggggccgtacagtttctttattcgtttcggtcatatcctctgagtaaatccataaaagggaaggaaacaacatagaattaaaattatagcatgcccattttcaaaagcagtaattaggtagtatttttaaaagctgaacagtgctgaaagattccctagctgtcccattgtttacatgtgagaaaagtaaggcttttaagacctgttaccaattgttacccaatactggttctatatctgaggactaatagatgctacatatgctggttctccttggaataataaattgtatttggcactggtttccaataggttttctaactataaagttgttgggaaacactgtccctagaggccaccatagctaagcattgctgatagggaacattgttcctagagaccaccatagctaagcattgctgatagggaacactgttcctagaggccaccatagctaagcattgctgatagggaacattgttcctagagaccaccatagctaagcattgctgatagggaacactgttcctagagaccatcatagctaggcactgctgatagtgttactatgcttgtgttcttttccctgtctcaagagccacttaacctatgagttgcctcccacacttgttctcccgtttgtaatctaaatggagtccatcttgtaaatggctaaactagtttctaagaagtaagtctcagagggagtcacttctccccaatgggaaggaagtccagttctcattactcctggggtgtagagggagcacatgagccttaggtaacaccagggctttcatcttcataatctaaatagacagcgcgctactcgagggcaaaggctttagtcaggcgtccccaagaacattttcttcctagagagcagaatgtttaccctatctctggttcacttcctaagaaaagaatgaagaagaagaaaatgtgcataagacaatgccccaggtcaggacccgagttcagatccccagcacccatggaaaacctggacgtagccaaatattcctgtaacccccgtgctaagggagagtgcagaaacgggttctcaccaacagctagctctaagtccagtcagagactgtcccctgaaaccaggtaatcacctgcaggatactgcatatcccgcacagcatatgtacttcatcaccaagcacatgggtgcatgcgtatgcatacagcagggcacacaacagctgaagccataacagcaacaacaaagacacaccctggttgagttaatgacctgtaggtgtgtgtccttgtgtctccggtggcactctgccattagctcacagtagtagttccctcatccctgcatctcatcagtgcagcctgagagtgtaagccgtggagtctgtcactgtttacataggtgtccattctaagtaagcagctgcactgggcagagtgtacccagagtgaggacttgttagattctgcttgtactttgtccctattctattattgatccgaaattcccattttcttccctctggctatgatgtgtggttggataatatcattttcagaatcaaagaaatcgtttttgaaaaatttaaggaatgttttttaaattgtctttaaatttgtgtgtatacttttcagatgagtttatattgagtagtgctatgccatatactgtagtaagcacagaaaaaaatatataggcagacattcattctggctttctaaacattaaatacctaattttagccaaggaatggagaaggggttagttctaagatgctgtatttgcagtatattcatagaaaatagaggtatttcctgtgtggccggtgggtttcatttgcactgcaagcgatacacacaaagtcagaactatcttcccacaaacaactggatttctaggaactcatttgagctgaggtgcaagctgccttgtagaaaactcagagtggccgtgaccactgtcttagggttactgtcactgtgatagaacatcagaaacaaacgcagactgggaggaaagggtttatttggcttatacttccaggaaacagtccatcactgaaggaagtcagggcaggaactcaaacaggacaggaacctggagacagtagtgatgcagaggccatggaagggtgttacttactggtttgctcctcgtggcttgctcagaatgctttcttatagaacccagagccaccagcccagggatggcaccactgtaggtgggctaggcctgcccacatcatcactaattaagaaaatccctgcaggcctgcgtagcaccatgttacagaggcattttctctgtttcaccagtgactctggcttgtatcaagttgacataaaaccagctagtacaatagcatctctggaaggcttaccagagttttagatctttggccttcctcttcagactgcagggactctagttctcactagtttccaggataggcagagcttgtcccaggaagaattccctgtagaggtgaaccttacgtgtgacctgtcctcggtctgtggaggcctgcatgattcaaggtagctagtcagctccaaatgtttgctggtggtcacagcccaggtgttgagtggtcaggaggcccaagacagtctaatatttaaacacttcctctcggttctccagggagctcatccaagtccagaaacaagagccaacaacaggcagcttagtcatggacatactttaactcagatctttttttattgttagcccattgcagactttcgtattctgtttgtttgtttgtttgtttgtttgtttgtttgtttttcaagacagggttttttttgtgtatagtcctagttgtcctggaattagctttgtaaaccagacagagatccacttgcctctgcctcctgagcactgggattaaaggtgagctacccctgcctggctcaacttttatactcttgaaattgtgaaaatcacttcctggtttactaaatcctagatgatgtggcaacattggatccactttctcaagtgtctgactggagaggaagactgggtaggaagcagagggaggggcctccagtcactgtcctcaccacacctgctgctttacacttagtttatttcactctttaagtttgaaatattttgcttcaattttcctgctctgatcattatatcctagcgttttctgttgtggtttctttaatctttgagactgggatgtccacaggacaagccgctgtcagaagacttatcagttcctttatgtactatatatagtgttggcaccacccactccaatctgtttatggagatattaaagggagactttttaaatatacattaatttcatgtagtacactgggtctcaatctgtggaccacagcctttttgggagtttaacagccctttcgcagggaccacctaagaccattggaaaacacaggtatgtgcattacgattcataacagtagcaacataatggcatgaaataacaatgaaaataacattatgattgggggtcaccacaacatgaggaactgtgttaaagggtcacagccttaggaaggctgagaaacactgaggtaggacaaacagctgataaaattaattctttgcaatctgtctctttggtcatgaattctgcatctatctttgttggatttgatattgaactttaataaaaatctttccttttctactgtttttccttttatcttctgaatatatttgttctcttctaggtggtggtggcaggcaccataataattcagaatattggaggtaagcattggaagtgtgtcatgtatacaacaggtcatggaaatcattgttttcctggcttctggccttcctgctggtctagcttggacactaaatctctgtagacatagccatcttcagaagtctctttatttgcctcctgctctttcttggatcctttttagtatcagtggtaaacatgctaatgtccaccctagccaggtcttgattatagttgccctatgtctacagtgcactcattagttttcagtggctgtggtggtgagagggtgcagtttggaaatgctcccaaagtgagaattgactatttttcttctgcattcaccctgttaacccactcacaggtgccctgttatagggactggagccctgtgggctgtgtgaacagtcaggtgtgcacaatgtccgctagaagctaagacgttaggaatgaccaagtggcttctaataaatctaaggacaagagacattctcaattttatctttcctctggtctctactaaaaactgatcctacaaatgatcctaattatgagtctgtgttagaaatgaaaattactgctaattatagacagttggccgaatgtattaaacatttaactccaaagtacagaaatcgcttatacatgctgtaaagagatttcatagagctgagcagcatcttcatttctttttaccactggtgaaatgctaaagaaatactgtcagtgtgtggaaaatccacagggaaagtgatgtgaactttgggtcttacacaagtttgtgtgctcacaagttttaatagtcttatataattatataattgaacttaagatctgagctatttcactgtaagtattgttcaactaaactgtacctttagtgttttagttgtggggaaggagcgtctgatcaatgaattgttatggaatcctgaatgtccacattttaatgctttgaattttcatgaaacagtgacttcgtacttcactccaaaaaccaggaaaactaacttcagcctttgggaatttttgtagtacaattgctttcaagatttcttgtagaataatttctagttagcaaatatgtattgcttaactctgcttagttataattcttctgcaggccctcattaagattttgtgcagattgaattgagctattgttgaataatttatgttgaagatttagttagggaatttgaatccaagctttaatctcagcgtgatgcccactgtctgtttcctgtagttttaacggcagtgacctctgtttctctgacctgacttagacatggctgctttagctgctctttctctgaggtcatcggaagtggaaacttaagggttctttggaaagttggttggatgatgttttgctggggcaaacacgtgaaggtgaaaggctaaggcagactcgtgaaggaaggtttaactgaagcagacacaggagagaggatgttctgctaaagaaaggacacatgatgaaggattctttgctaccaacacacatttaggttgcatagttgagttatatttgttgggacaccatagagagaaatgcatcaaaaaacttctagtggcatgctgcagtttcttgccatttcagcttccgcttccgtttctgaagactccggctgattggcagagtgatgtcagctgagacaggagcatgagctgaggcaagacacatgatgtttgaagggtataaacaggactctgcagagtgacagagatagagcttggcttgcttatatagctagctgtagctcaaatcttcgctgatcttcgctttgctgagagaggcacagctgagaacttctcctggtgtccctctgggtccctcctgctgactcaagccaaggccaaggcctggctgtctctgctaggtcatgtcaccaatattgctaaccctagtctactgaactggactgctggtgtatccatgaaatgtttgtcagtggatcgagctgccactgttaacctgtgaattgaactgctgatttccagacaacacagacaggagttgctccaaaaaactttctaaatagctccacttcccccatatcctttcttttctactacctctggtgggtggtggattacaagggaggttaaaacatttaaaaagccatcattaaaaataaggtttaaaaaaatcatctccacctgtactcatcttatgtgctgtcaattcttcagcagttatggcccattcctctttgtacttccagcacccaacagtgtctgcagctttgctggaatgagaggcgtttagatgaccagtcctctagatctaagcatttcgagttagagagatggctcagtggttaagagcactgactgctcttttagaggacccaggttcaattcccagcatccacatggcaactcagatctgtttgcaactcaagttccagagggattttatgcccccttctgtcccccacaagtgctacatgcacatggtacacagccgtacgtgccactagaacaccaaccccccacaccccaaaaaaagtgaaaataagaggggactggagggtggatagattagttggtaaggtgcttgctgggcaagcaaggatccgagtgcaggttcccagcactcagacagcccagtgtgacgatggataccttaacccagggcaggagaagcagagaggaggctcttgggactctggccagctgacatagctgagtcagtggcagcactttgagtggggagcctgtctcagacatgtaagttaaagagcccatgtcaacacgggcacacgcacatacacatgtgcatgcatgcatgcgtgcaagaacaaacaacatgccaggtccttcagtagtgtcaaggccaaaagtaaaagataaagaaaaaaaaaactagactaatccagtttttggttttttgtttttttggggtttttttgagagcaaaattggttctgatgcaaacaagtccacagagaggctaatttaagttccttgtctaggatactcttgctcgttcgttctgtgttctgtaacagaataccattgactgggtaatttttgtaataaacagttattagctcttggaggctcgaagtccaaaatgaaggaaaccaagttgagtgagggctcttttaccagatcaaatgtggcgggagccttcaggtgctcacatagagcactgttgtcagacttttatttttgttacaatggggctaaatccgtgtgtgagtgtggagtcttccctttcccatccttacatgccacctcaaacactttttccttttgggactgcttcctactggggacactgtcagacttagcacgtagccctgccattaagctgtgtgattgaagtggagatgacccaccaccttttaaaaagtgttnnnnnnnnnnnnnnnnnnnnnnnnnnnnnnnnnnnnnnnnnnnnnnnnnnnnnnnnnnnnnnnnnnnnnnnnnnnnnnnnnnnnnnnnnnnnnnnnnnnnnnnnnnnnnnnnnnnnnnnnnnnnnnnnnnnnnnnnnnnnnnnnnnnnnnnnnnnnnnnnnnnnnnnnnnnnnnnnnnnnnnnnnnnnnnnnnnnnnnnnnnnnnnnnnnnnnnnnnnnnnnnnnnnnnnnnnnnnnnnnnnnnnnnnnnnnnnnnnnnnnnnnnnnnnnnnnnnnnnnnnnnnnnnnnnnnnnnnnnnnnnnnnnnnnnnnnnnnnnnnnnnnnnnnnnnnnnnnnnnnnnnnnnnnnnnnnnnnnnnnnnnnnnnnnnnnnnnnnnnnnnnnnnnnnnnnnnnnnnnnnnnnnnnnnnnnnnnnnnnnnnnnnnnnnnnnnntctccctctccctctccctctccctctcccccccctcattctgcttggctttagttttgcctttgttaaaaattttggtgggaaatgcagagcttggaatctgttttcatctagaagtgtagattctgatgtggttcttggggaaggtgccatggcatgtcaattcttttaggcattaatggggcagagtctgtatttttagttaggtgtcatgtcttaaagcttcctaactctttcagtctctcccccttccctttttgtgttacaggttgttactgtgcagtctaggttagcctctgagtcttagtctttctgccttggtgcctgggcactgggattgcagatgttcaccactgggattgcaggagtgtaccacacctaatatattagttactttacctaatgctgcaaccaagtacctgagcaggggctttatctctgcttacagctccaggggacaagatcctggaggggaaggtagcgcttcagtaccctaaggctgctgacagagtgccccacagtcagtaccctaaggctgctgacagagtgccccacagtcaggaagtggagagcaggggttagtggtgctcctcttctgtccccattttctttaatccaggactccctcccacagagtgacactgtccacagtcctggggtggctctttcagccacagttaaacttgtctcccaggagttctagatcctgtcaagttgacaaatgttgttagccattacacccagcttctcgctctctttttaagttaaagacttttcacaaaatatatgtcatgcatatctcctgtggccccaacttctgttctgtgctatgtaatgtttaaacatcttcaccttcttgttttaatccctaacactaaaaggaaaaacaagagcaaaatgatcataaattcataaattacatttgactacttattctgtgggtctttggtgaaggcctggtttattcccttaccatagtcataaacaaacaggcactcacgctgaccacaggcaccagtgtgacttaccaaagtgactgtggtaggggcttccttccaataacctgtgaaaatgccaattatgacatttagggctcttaaggttttagagttattggcctttagaacatggagagccataagaaaatgatctggtctctcagcagtgatttggagcctgaatgaggcgaggaccagctgtagctctctgtgtcccctgccttcagcagagctagcgtttgctgtgagaaagtttctgctgggccagagggagaaaggagccatcctagagcgttaatgttgaatgttgttgctggcaagagaatgcgagtgctgggtttgaacttactgaagtaccttctaagaggaccgagtagtgtggtgggaaggccagctgttctcacagcgcctgctgtttcattactcactcttcccaccatctgaaaaatagtcagtttcacatgaaattaaacttctgtggtagaccattccgtaggcggcactgtcactggaaatcaaacagcaaacctcccctcagctcagttacgccaaggaaagtcctactcactcttggaagtccacggctaaagcagagccacttaatgttcctaattcacacatcttgctcaactcacaacatttccatgagtggctctgagcagcgggccaacttcctctacttctataatatgtgagtcttcatggcttagctcctagggcctcacagattaaccattgactcgctgcacattgtcaggagaaacctagcttcacgggaacctcccgaaatggctaggatggcccaagttttccggactggaaagtctggcaccgaatccacagacgttagcagccttgattaatgcctcagttcgggctattaggtgtgggagaaccacagctgcctatgcactaagatagctcagagtctgcatcttacagacaagacccagcaaacaaccacagtccatgatgaaatgttagacagcttatattgtgttcttcctcttcttatgactgtgaaggaggagcccagggtagtgatacagggacaggtctggcctgtccctcaggagctgggcttggaagtgctgctacaccaccatctgctggtcaggcacactgcagctttgtggttggttggttgttttgttttgttttgctttaaaacctgaacagtattatctccaaattctagaaaatattgcaaaagtctagaagtatgggaaatttgagaggagtcccttttcacaagtcagaggcctaaacaaacagaggcactatggcatttgccttgacaaaatttagtagtaacatcatttcaaaagcagtgcattagcagttatttcagttgacgtttgataacaagattttaaaaatagatgactctgtgtgtgtgtgtgtgtgtgtgtgtgtgtgtgtgtgtgtgtgtgtgtctgctgaggattgcatgcaggctaagcaggcttttcccctagccctcctttcccttctgttagagacaagcaggccttgaacttcttgatcctctgatatcagccccgagtcactggaattctagagcctagccactaggcctgcttctctggtcctgcttaggtttagggtcttaacaaactgtaaaataagggctcttttaggacagtgaagtaacattttccaccatgtgaaattttttccagttttgcacaacttagggaaattacattgttttatagagattttgagggaaaaaaaaaaggattcttcttaagaaagagactgatacagtttgagtgggtctaaaatttccatgcatttagaaatctagtggaaacaccaggttaatgagccatcttgaatacagtagttattatccatgactaaagacaaaccatggaaagacaaaccatagtgcctctgtttgtttaggcctctgactaacctctgagcgttgctgggctccccacccccaaccccgcgagtgctgagaacccagtgctatttttaaaatagctgaatgtcatcccagcttcatgcatgttctcctaagtgcctgacaacatgactgattgtcttttagacaaatgattgtttagacccaaactcagtcaagtcttttctttcttaaagttatgtggttaactaatgacaaacggagaaatatctcaggttgcttggggagcgctagttctaaagcttagagacacaggggaaggggattgctttttgtcttttctttcaggtttcagtgatgtgttaaatctctgatacatgcaaataggagactttctctttgcagctctgcctctactgacatgcaactaaataatgacagcagatactatgaagtcctggcatgaagctcatgaattttgagccagttactccaacaaacgggctacagccccaaatggactccattaacaaagcaggatgtctccagtgtggtgcaaaactttgatcttcattagagagatggttattttctttgagcccagctgatgaactcagcagccaaaagctgtttgttgcttaaatgctgataaaaataaataaaggcttcattctagagagggccctttgacagagttttcttatttttcttggctttggctgatggcttcccccacctgcccagggcaaactagcttgtaatagagcgagcccctcaagtcagaccaactgtttgcaccagcacccacgtagcaaatgtgtgcacaggactcccaatctctgtgggcgaaatcatggcttcctggcaggtcagtatgaaaaaggtgtgcaaagaacttcctatcacttagaatgtagccaagcatggaagatgcttgctgtgcacagtgtgagcagtgtcctcattctctagccttgctcctctgtgtccaaactcatgactcccatgacctcaggcagtagtgagacttttctacctgctgttgcctgaccagacgtctctgtctcagtgctttcctgatggaaccatcgcttttccatgtgatttttcaattcctgtgtcttgactaggttgacagcattcttcattttctttccagcatagtttcattcaaaacaaaggggaaagaatacctattcggctaatgtggtgaaactaactgatttgtaatggctgataactgtcgtccaggtgtatcttagacacggatcttggctctggtgttaaggaggccagaactgtttgcctgtaactgtggtccttgtggatgacgctggtcagccattaatttggaggaagcatgttgtattaggagtctgtaccatggagagattccagcaaaaatcatttacaaatttttgcttatggcctgtctctccaagatgtcttaagcatttccttatgccattaatagaagacatgggacaaaagacaaggcaaccagcttttcaacctagtgaccttctggttaaaaacagtggatatatgagcttttccgctgataatatttttctaaacctttctcagcttactttattgactggatcttttgatgtggctgtctgtaattaaggtgtatttctagtgtatctgaatcttttgttctcagtattgtgtattatatgttaaggtgttagtacttacatgaaaatttatttgtggttaagaaaaagtagctttaacagtgagatttctttgttttacttgctcaaccagtgggattttccccacggtaggctctgtggttttgtagctcttaaaacacaccagcattctccaaggaagaagcagggttttacatcttttattatactcgtgtatactgagaggccttttttaaaaaaacagaaacatatgtttagtgagttcgtatttcttaaaatccacatggctcttcagactggaatctgttgacacaggactcccatttgaacagcagggtgaaggcttcaggacagaagtgatggagtgattagccagaggctaatagaatcctgggaagaatggcagattgtatatgggaagaaatacaatctcacgctcattgtagcttttttacaattaaagatcaaaaaaaatagaaaattactggaagcgatggatgtctgaaactttagagatgcagatggtgttggatgagtcccagccgaaggcccgatgctcagatgataaaagtgttgggtcggaagtcgttctgcgggccttgttctgttgcatcccttttctgaatgtacttttgtctctttacccctcctcctctctcaagatacatttaaggagtttctaagccaatcgcaaaacctctgcatcacatcatgtacatatagttagttctctggaaaacaaactaccgtgatgactccaaacccttgagcaaggaggtaagcatcagccttcctctgtcctgtgcccagctcatggtgtctctcctgagaaagtataacaagcgagaagacatttctatatccatagacatttcttacaggagccatagctaagggcttgtacgcatgtctcgatggctctcggtgagcagccatgtttcttctggagaaaaagaaacagtcataaattacaagacactggtgcatgttttcatcgcaagtgatcgttacttgcctgttctaaaattaactttaccataagtacctgctatttaaaaaaaacaaaaacaaacaaacaaacaaacaaaaaccgtgttgtcatgtaattatttcttgtcctgcaagctgacatgtgtcattattcttcagagttaaattattgcagcatcatacctgcagggctcagctactctccaacagcttgcctggaaaatgcactgttcttaaactgtgcatcctctcatccaacttcctccaggcctccattgttcagacttggcattcactggtgttcttagtttttataaggccaaagagaaagtggaatgtttcctgaaatataaataagtaataaaagcagtgtgcacatagaatacactcttcattcttcaagggtggtttttttcattggctcttaaaaaaaaaatgtgtgtgtgtgtgagtgtgtgtgatatcaatctgtggggaaaagattgttaaactgaaggtatgactccggatcatctgggtttccagagagctgagtaagtttccccttctgtatttgcctaagtgagttctatgttccatggccatattcatgatggaaactttacaggggggtgtgtgtgtgtgtgtgtgtgtgtgtgtgtgtgtaggacagaagagggtatcagattcctggagctggagctacagctagttaagagccgcccagcagttctgggagccaaccactgagcatctcttccagcaccagaatgaccgtgtattttcataaccatgtaaggaacagtaccattgttatatgatagacaagccagctatttctcatacgctaccagataaaatccagatacaatgcttcctttggttgctaacacacacagggcatggatatgaagctctggagcctcagcaggctgtatggagccgtgaatcagagaacagccttatataatataaagttcctgtttattctgcttatgttttataatatgtagcagagagaggaagagaacgagggacctggacttctgagtgtgacctttcttcctagttaaaattaaaaaaaaaaacaagtgataagttattaatattacttgttttgtgtttttttttccttgttttccgagacagggtttttctgtgtatccctggctgtcctggaactcactttgtagaccaggctggcctcgaactcagaaatctgcctgtctctgcctcccgagtgctgggattaaaggcgtgcgccaccacgcctggcttcatgtttgttattaaattaactttttgtacattggacagaggagacaatgcaaaagggagtttttgcaaagctttataaatggcctattacaaagtgcccggttctaacaaaggttatatgataaacttgccgattcttctctacagagccatttaccttgctttctgctgtctgtgtgtttgggatagttcattgtaagttatcttctatatgctgcccaagagccaacagacatatgtgttcctggatagattactcttcgaatctatttgaatggcttaattgtaataggaattctctttgttctttttgcagctatgtcatcttatcttttaattattaaaacagagcttcctgctgctatttcagaatttttacctagtgaccacagtgggtaagaaaaaatgttccattgtatctgtccatccaccagcctgcccattcataatctattcattcatttgtccattgtgctttgactaaaacctagtgtcgagggagggagagcaatgtagtgcttagcctcaggatgcttacagggtttgtggagtggagcagtcatagaggaaacactgtccacatgtctgcacatgtctgctgatgacccaccgtgttgagcactgtgctgccaaccacagcagccccgggccttgtgctccgtgaaggtaaaggccaagtcaagtctgaattagctcttagagcaaagtaaagaagccttctagggtatgaaactggaggagattaggggaagcctcaggatctcaacgtgggagtgacatggagtgatctctgctgtcaccctctcagcaaggcgttgtgacaaagaatatgatggttgcagccactgtgggaggttcatattagacagcataaagaactacgggtgaagtcttgtgctactttgccttccttaatattgtgaaagagctgcaccacgcatactgctttctcctttaaacgcagactcctacatagtatgttcgttgccttagctctttttatgggtaaggaacacattcattatacttttctttttgatatctagaacaagacttcctttttttccctagaaaaataagctcaggttaagcctgctagttgtccagttttcaaaccataacaaaggactgccctgtttctagactggagtatttggttggttttccccaataattaaacttatctggaacgcaggggaaaacttcagacttgagttttcagcttagagaagttgacttcccttgaagaagcagactagtgcagatgtgcatgcaaggaaagttagttattttctatcaaaataggaactgtcaagatggcattaaaatggggatggtaacgtcctctatcctcagaaagcatccttcacacggcactttgtagctcattagggtcccacagcatgctccccattcctggatttatggtcagctctacctggttgtgttgaatatgttctattagatatctgactgctctaagaagtagctgtgtgaaatatactttttttgtatttgttgtaaaaatcttaataaccacttttgttatttgaattccaagttgggaagtgtgtgtatggagctaagaactcaaggcagtgtgaggaagaataaaacagtaaggaaacatgcgtcccattcacttcacaatggctagcctccagcatccgactcctgaccagctaacgggtcacgagctgtgcgtttctttacctggtgctttgaaggcaccagtgagggctgggagtttgactctcacacaagcgttcaccagcatacccaaggtcctgggttcaagtctcagtaccagaaaaaaagcaaaaacaaacaagccttttgaaaaggctggagaagctcagcggttaagggcaccaactgctcttttagaggatctgggttcaattcccagcacccatgtggcagctcacaactgtctctagctccagttcctgaggggatccgatgccctcacacagacagacatccatgcaggcaaaaataacagtgcacataaaattaattaattaactaattaagagaaaaaagaggtcatcaatgaccttgtctttaattagttgcttccttaacagaattattataatgatcagataagatagcacgtgtgcacgtcttccgagtgtgtagcctggtgtctgtgaggagagcagggaatcccagcgacagagattgtattaaaggcagactttcctatcttagtcagtttgccaggaagctcagagtcaaccgtggagaaactggtcgtcctaatggttgtcatatgtcaccgagcttgttgcttaccttttgtcttagttttaagtcctgacttctattaacatgttttaagtaaacttagaaacacttaaagtgctgtgcagtagaactgctattagaactgaggggttttgtctgctaaaacattttcactctaaatctgttgccatgtctactgttgttttctcattgtttcaaacagttgaaaactcctgtttcactcatactagtaaaacctttgtataaatgttctctttctggcaggaatgggcttttaaaaacttcatgcttcaattacttgtcaccgattttcacccaccgtgtgtgaaaattgcacacttttgatgactcatattgttttacatgtcctctattcatttatttagagactatattaattggatacagggcattaggctttgaagcctaatcttgtaaagtcggagacaaatgttgcagtaatgaatatggcttggggggcagtttattcctaggtgagttgtgtggaagtatttcttcactgagatcacatgatattgatgttttattttgacatttggtttaccataagtttagttaagatattttattttctgggttgtctgtgggtatgaataccttcatgaactatgaccctttataaagatgctgtcaaatcactttgtgtttatatatcctaatttcaaaacgttactattgaaagtcgaaatcagtaatacttatactaagctcttatgatacatccatatttttcctagaataacttgtattttttaaatctttagctgttaaaagtcgggagctctctgttaacatttaatggtcttgtcaggggactatgattgacacaattaagttgtcttgcatttgagttacataattgatatgggatgtgagcacggtcctaattgagaacatacgatactcttgttccattctattcaagaatgaaattaaagcaacttataaataaatctggttttcattgaaaaatggaaaaaacatctgcgtgccaagcatgtgcaatacagctaaggatttatactctgggtttcatagttggagcatttttatcatataggattaaatccacagatcaaacaagttttctaggaaatataaaacctctgactctaattcttttggctcaaagagaatgtatactaggtcacagtaggaaaacaggagtttggttagataattctttttttctctctcttagaaaaaaaaaattacgtgcaataaattatcctaaaaccttggtttgtaaaataaatgtatttaatatgtactttttaagactgcttattgctggtttgtattctctgggtttaggcttaatcttatttgttctttggacaatctccattggcaaatgcagtgcaattgtctggggcctgcaagtgaaatgtgaactcactccccatatcttactatgtagcctttattgataatggatgaatgataaagaaatcattgtcttaacgattgattttattaacatcaatcaacaagtataagaaatgactcccaataaccagtatccaggtctagacaaactgttttaaaacaaaacccttttcttattacgattttaagttcaatcctgaagagaaagtgaagcatgaaatagatgaaggatcatctggaaaaaaacaaaaaatgccatgaactcagacttgcagctgggactgcgagttttctcattgctgctgtggagaacatggtgaagatgctggacagagtgacctctgagccccctccagcccaagcattccctagctctgcaagtttgatgcctccacaccctatagtcagggctgtgtcagtctccactctaacagatatacacgactgcgttttctgcacccacattcagccacaactcaggatatcaaagtgttcctttaatcctatgcaagaggaaagctgtggtcctatagcttaacacacaccctttgctacaactctaccttcccggtagttctctcccctctctctctctctttctttctctctctctctctcagagtcaagttggtttgtaaccattttttccttctttctttttttttgattagaacactgatcgtgagcggcaccctcttaacagatattccgtatacaatgcagtgttgttatccagcaggaacagcagtgctaacagatggagtctgctccgctactccctcggggccattttctactggcactgcaactgtctgggtctgatactgggtcccagaaggaaagatgtttcagacagagccccgggctcgctgccaggttcagagtttagttaccaggtgtttcttgggaaaggctattgtgaagttcctctttggtttttttattcaagagtgactagaagatgaacgtgctgagtgtcagtttgtgtttattctatggttgctttcatagtgcttcctgcaccccagccactgaggggcacgtgcaggtgcagctagaaagcacagcatcagccctgcagagcaggaatgcatgtgcatctggcagcgcatttgcaaaggacaggagttggagcaggactctcaaggagggtgtcactacccagcagtagtgagtaaaggtctatcaaaagggtgccatcacaagccagagtgtaatgatctgcactgaacagtgaagaccacgcgtgctagaagccagctcttaaacccaggcaaagggatactctcgggatttgtcagggcagtgggacactggctacctgtaagcgtgtaagaggatagtttatcacagggtagggttaagttgaaagcatctgccaaacaccataggaatccccattgatcgttgatggtcccagacctgctctagcctgggttttctttctttcattttttcgttttcccagacaggctttctctgtgtagttctggccatcctgagactcaccctgtagaccaggctatcctcaaactcaggtattcccctgcctctgcctcccaagtggttggattaaaggccaacatcacgaccacccagctgggttttattgtcttacattgttacaattgtgcttatatttaatatgttctgctgatcttcttggttaattactatactttcattgtgctggttacatattgccatcctttttccagagagtactaattggacaataacatagtaatacatgttggaccaagtataccacatccttgattattttactaacttaatttcagtaatctcaggatagatatatagttattagatttttcttcctatggatttgctagttcatgtacttctatcatgaactgtttgtctttcatgtgtgcatgtattaaggtcttggggaattaactttaactttaaaatgtttatatagctgtactaaattaaaattatatatgtacccatgtattacaaccatgtagtaatagccattttttatattctagatatatccttctgactttaaatatatatttatattattaaaaataataaatattttatatattatatatttggcgtatacaatatgccttgtagttcttatataaatatgtatttattataacatattaaataatattttgtatatattatacatatacataaatatagatatagtatatatattttaatatacattgcataaacatataaaatatgtattgtattataagtaaattaaatttaaatatgttattattaaatatatgttgatagtgttactttttcctctttgtactgatatttgtctttcattcattttgggtatgaatgtgtgtacacatgagtgtgaatgtacacatgttgtatgcatacgtgtgtggagagagaggacagcctagggtgttgcttcttaggtgctgttcagctcgttttctttttaagacgaggtctttcactgtgttcacacttgctagtgaggctgatctggccggcagacctgcctccaggtccccagagcatgctgggtctgtgccaagtgcccaggtttttttttttgttttgttttgttttttttttgtttgttttttttttaaatgtgagttctgtggatgtgattcctcaagcttgcaatgcaggcaatctactgacaggcccagccccatgttcctgctctgttagcaaacacgtgaacactctactaaccaaccattcttactcagtgttctcaaagctgttagagaaaaggttagcactttggagaaatgtagagaggtccgacaagggaaatgactccttccttgctttatcacccagaaacaatgaagttcctgtcctaataatatctgtatttttctttaaacagtatcagactacaaacacacttcatatccattctttcggagttgtacaattaaataatttgcttgcatccagttttcatgattttctcaattttccttattttaaatgttctcaataaataccactttataaaagtttctgttcctattgctgatgttttgttgctcatggtattttataagtcttatagagcataattatttgaaggctcttagcatcattgccagttgctttccatgtgagaattagtgcgcttttagctttcagccgtgtttggcatacctcagtactcctcacaataggagttacctcattttttaagtatttgttattttggtaattgaaaaaatggcatctcattgggcacttttgtgtgtttgtttaggtttaggtgttgtttggagacaaggtctcactatgtagtccagaccagcctcacactgttgatcttgcctttgtgctgagctataggcttatagcaataccattttaatacactccctaagttcatacctgttattaatagtgcagggctttcctaacaacatttaacaaaaaagtggggtcttgtttttaatggatgatccctccctctttcccttttctcttcttcctcccttccttttctttttctttcttttttttaagctctctctcccttttctctcnnnnnnnnnnnnnnnnnnnnccccctcccgtcttctctgtatgtgtgttagaatagacatgaatgagtcctgtgtcctatgcctaacagtgtttttccgacaggtcttggtatcttgatggacagatgttgctgatcatcatctgtgtaggcatcgtgtttcctctctcactgcttcccaagataggtgagtctacagagagtgagggactaaaacctcacaccaccatgtatttagaagagtagtgcttgtgagtccttttaaatttggcccatttttggttgttccatcctcagccctgcctagctaactaaatgtgtatgacttggcttacggcagcattctgtctgccccgctaaaatgaagtccttacagcagaccattgaggagcaaggcttcccatgcatcgcactgctcgtggtgggccagttcctgttctgctgtgcagagctacataatgatctgtgacagtcgggccctaggcccagataccaagctgcagtagaaaacatgcccacgatgcatggctctgtttgtaagtcgggatcacttgccttataaattgctttttattttattggtattttacaggctttcttggctacacaagcagtctatcatttttctttatggtgttctttgctcttgtggtaagttcaaaatataaagcattgctcatttcatctcaaaacgcaactgtgttagtgactgacgtttctagcagctttgcactcggcaccatagcccacttcgtatcattagcagcactggtttttttgttttttgggttttttttaacataaaagtaatttcagtcacaggattattcattttgtctattttaaagaagcttaaaacaaatttagtatcttgtagttggtcagagagggacatacagaacttgctaggactctaggtagaatagacccctggacagctgtagcagcactctgtggagcagtgggctctgtcagtcagttagcagagcgtcctgatgctttatttcactgatgaaattatagttttatagtttgagacttggttggaaagctctaaggagaactgggatatgaacgcaatcctatccgccctgcttattcagtgtaaaatgttcccataaagataatgtgggaaaataatatttttcttcatatgcagaaaatatattttaattatcagatttttattatatatcagatggcagttttacttcttttatatttataaaataatttaatataggctttttaattctcctaagacagatccttgcatataatattttaataaactttttcctttgcactgtattttattccatattaagtatataaatgtcaaaccttacatagaataaaatatctttcatttgccaggaatatgtatatcccaagtgacctttttctgagcacacaacttgcagccccgtattactgcgtttgtgtgcacacaaagtcacatgcacacacagccacacaaacatgcaaccacatacccactctgtatgaagacaccagtcatatttgcatcacatctgtctttggttaaatcatcttctgagacacagaataaagcaacttaaaataagtgcaagtagccctgatttcactcttcataaacatttatgttgtaaggaatttgttaaggctgaaatatttaacagcgcttggtcattttttaatttatctacattaaaattatccctctacccaccccagttgtcaatcaagtaatgacaagttagcatataatttttaggttctatactataaagagaaacagtaggtattttcatcacaagggagtagatgagaagcatccatgaggttagatggtatcccacatacacataggaatgtatgaatcttaatcgcctgtagataacatactgaattttgccctggcgcttaatcgacaaggcaagcatttcataggtagaagtaattccgttttcacagtcaatagcttaacacaggtggagtgcattgatgcaatatgtctattgcagtgttttgtttctgctgcagcagatactctttaattcaatgcaggtttctgctgcaggggtcacatggaaataattctcccatattaatcctgatgctccacaaatcatctacttgaatttctacctgtgagaagagttgaaatttagactctagcaagaccatgaagtttatactttttaatgctgtttttttattgccatgtttattagagattctatttctatttttgtttttgtctttttttgttttctgagacagggttttactgtgtaaccctggctgcccatgagcttactatgtagaccagacaggcctggaattcacagaaatgtatctgcccatgcctctgcccccttagggctggcattcaagctgttttctaccatgcccagctaactaactctaaaaaacacataccagtttttaaaacgtgagacgccggcaattctctcccgtcctgtggttgggtcctagcccattccttacctgtctcagcatctctgcccattgtttactttgagactggtatgcataagtttattacatttatgttatagtttatagaatcgatccagaaaacgtcgtcttaattgttctcgtgaagcaatgcagaccggagtgtctctactagctattcttccagatcccgattgccattaaaaatttagcatacattttcctttgagagtatctacgtttaaacatgtttcaatttggcagtggctcaaagtgacagtgagagatgccttcatcccttatttttctaacctaccttcttgtcactggcattgagagagttggggtgagttgctgagatctctgtaaatgaacatgggaggaagtaagctgggagctgccctgcagaaatggaagggccttttgtgcaagggcattaagtatttttagtgcctaaggtgatttctcttcttctcttcccatcccccagagtgcccttcttgcccagtctgtcttcagcgccaagcaaggacttcctgtgactctcctctctcttgtgcttgggtctctgcccactcctcacctgtctgcatctctctccaccccaatgcaccatgcaggtttgaagctgggatgacccacaggaattagctgtaataatggaatttatgttagtgtaaaactaagttgccaataatgttttcctaatcaatgaaataggctatattgtatcttgaaggattttgacttggcattcaaggactggtactcagcagtctcaggaagccaggaggctctgttgctgtcagaggctgctctccctccccccctccacccacccagtaagaggaaaacaggagacattgaatttgcagtggcatcagtagggctgaaccctgcttttccagctaccttcattctcaccccacactccatctctcttttaaaacaaaacaaaacctaaataaaaccaaaccaaacaaacaaacaaaaaaaaacccaacttttcaggaaaagaaaagataatgagattcttggttcttgttttgttcttgtctcttgataaattgatggttggagttggttttattttgaaaacttacctggaaatacccagtttgtcccttagacacccccaccccgttgggggttagattttaaattaaaagtgactcttgggttctctcattaacttaatcctaaaagtgtgtgttttctttagatttatcactgtataaaattttgattgaatttgttaaagtcccaaactagataagttccaaataggaatagtatttacttacttgtctccgcaaagacaaaagcttcctttcttcctctgcccctttgtatgctgggatttagcctggagcaaacatttgcagagtaattatgtgcctgcaacagggctacaatggcagtgttgacacagccacaactggggctgcaggaacaggacggccacaattaagagtcaaatcctgaagcatgcccgttgatggtcctgggaaacagcatccctccagctggagttccctagctctgcacccgattctggccagctttctccacactcaccaatagcacgaacgtgaaaacctgaagaggtgaaagtgtgtgttcatcaggagtaccaacaagcacactgagaattaaagtctccccccacttctgcctctcttctgctctgtctgccactgacgataatagataatctttgcagttattattgaaagtgtgcttcctctttgagttgcactttaaaaacagaaccagtgtactgctggagttttgaaaattgacacaagagtctttgatgagcaggattccccactgatcagatgtaaagcactcctgtcatgctgggccctcccctccgcccagtgaccatgttaaagggtgaccccattctctctgggaaaatcggagcatcaaggaaacttctgtttggctttattgaaagcatcaacttgtgatgaatttcactacagatcatctaagtgctggttgcatttacttttacaggtagtaattaaaaaatgggccgttccttgtcctgtgaccttagattgcatcaatgaagtctttcaggtaataatttttagcttttttttatttttaacctttcaactaaaaaaaagaaattgaagataaatgattattttcctagttggtgaaaggtaatagttacgtaacagtttagaccttttctttgaagtaatttgatttgaaattctagtagtaataaattcatcatatttgttgatgtattctgacttttaatacctattggtttttcttttcccctcaatactcttaaacagatttcaaacgcaacagatgactgtaaaccaaagctctttcatttctccaaagaggtgtgtaagttattaacagatacttttggttgatttttcacatttcaagttttaagagatttgtgttacagggtctcttaggtctttgtacctgtaactaattaattttcatgaaagtgctaagtataggattgcctaccagaagaataatattatttaacacagggtggcccattatgaaacagccacctttttcttttctttcttttggcatgcttttaaatggagcctgttttaaatgggcctttgcctaaaagaacagatttaccaaatgtctggtctggccagtaaggtcctctgtggatatggctttcctgttgcgctctggacttgtaaagctaaatcgccaattacatcaaaaactcctccctggtgagtaggactttggtctctagttaaacagcctcatcaatgggccagcatttgagtactgccagtaccttctgagcagaactccagggaaatttatgatgttcacagcagagaccagaaacccaagtcccatgcccactcttaagagagctgtaggctccggaaagtgcctggaagaatccctgagcacaagcaggcaaacaggggctccggctttgctctcacggaaaaggcggagccttcctgtttctgggagtctcttcctctcgactttgtttttctgctgaaatgtggttttgcaggccccagacaccagactctcctctcctcgctgcacagctttgttagtatagaatgttaatgtgggttgttctccgtgcaaaactttcccttttatctccagtttataacaagaagcgtcttcccaagccttgtgaggaggtcaccacatctctcacacggcggagacctccgtgggccttagatcagggcaggggagttgacaggccaggaaactgagcagcttatgaaacagagaacgtgtcttaagctctcattcccctaatacagcttcaagaaacacaacgtcctaggtacgatattccaaagtaggccttcatctggaacttcttttggtgaagagcccaacactagctcaggagaaatatttttagaccagaaaagagaaaataaatcattaccatccatttgttaaagacagttctttaatgtagaggtaataacgtttggcttgctagttttctctggctcttgttaagtattctaataataatttttaaagaaaccttaggcttatgtattacatgagatcctaaggagtttttcaggtctagaattaatgatcttggtgctcattaagaaagatcttggtcatggattctggcagtacaaagatgtggcttctatttggagtacttacttggatcgagtaactaaaagcagatttgaaagcattagcactattgctgcttgggtaatgagatgtatttaaatcgtgcataccttaagaacaactggaattataataaaaattattttaaatgtagctctttatatattacctaaattagttttatcttatccaaataatgtagaaagtgatcattgtaataaagcaacatgatttgagaggccagccagaaaatgtggttagaatcggcaagccacctaagctatagtagttgctggccactgcagatcctcttctctcctctctcccctctctctctctctctctctctctctctctctctctctttctgtctgtcgtatgaagagatcattcacaaaagatggcacagatttgactaagttgttttttagaaagagctttattgttgtgctggcaatggctcagctgtatgagtgtcttcggcaagcctgactccttagtcaccctctgacctctgcaagggctaactaaataacaatgtaattaaagcaagaagaactgaggttattatcaaatacaaatgatgtaacagataatagtgttttgttctaattttttttcagagcgtttacgccataccaaccatggctttttcctttctctgccatacctcagtattgcccatatactgtgagcttcaaaggtactgtggaacgctgtggccttcagatcaagtcacattctcacttatgaacccttccccattgccctgaattccaagtgttagcttacaaacaaaacaaagtaattgttttagtcggggttttattactgtgaagagactccatgaccacagcaactcttttttttttttaaagatttatttatttattatgtaagtacactgtagctgtcttcagacactctagaaaagggcgtcagatcttgttacggatgtttgtgagccaccatgtggttgctgggatttgaactcaggaacttcggaagagcagtcagtgctcttaaccactgagccatctcaccagccccccacagcaactttttttttttgtttttttcgagagggtttctctgtgtaaccctggctgtcctggaactcactctgttgacctagaactcagaaatccgcctgcctctgcctcccgagtgctgggattaaaggcgtgtgccaccacacccagcaacagcaactcttataaaggaaaacatttagttggggctggcttatggtttagaggttcagtccattgtcgtcatggtgggcaggcagacatggtgctggagaagccaagggttctacatctgtatccataagcatcaggaggagactgtgtaccacacggggtgtagcttgaacataggagacctcgaagcccaccccatcccccagtgacacacttcctccaataaggccacacccacttcaacaaggccacacctcctagtagtgtcactccctctaagtcaagcattcaaacacaggagtctgtggagctgattcctattcatagcaccacagcagccaagagctcagtctgtcctcactgggaaggttgccagtgacaccatctctgtttctgagtgtccacctgtgaattctagtgtgtagtcatcgaagaactcatgattggccctgactggccttgcaatgctcgtttcttcagatatgattcatatcactggctttgtcaaccttcactgggtatttgtttgtttgttgtttcagcccttcaaagaaaaggatgcagaatgtgaccaacacagcgattgcgttgagctttctggtttactttgtgtctgcactctttggctacctcactttttatggtgaatatatttttaattttaattatgcaacgaaagaaggacagatgccctcatcccacctgtggccttgctttctgccacttgcttgtaaggccatctatccaggccattttagcactgtggcgaatctgacaaatcacgcttaaggcctgtactcaggcacgttggtgcctttctcttcagatgcctgaaagacactcgtaaaaatataagtatatattttggagatgtttcctgcaaagtttgtggaggtttttcctttttcattaagaatatcgaaaacaaaaacaaaatgtagagcaagaaagaaaagataagcaaaactcacaagcaatcacagcacagcacccagcccctcggctcacccagtgttgcacgcactcgtcagttcacagtaactgcgaggacttggctgttttcttaggcgatgtgtatctgccggtgacctgctggagggctctgtgcacctttccggttttagacgtctgaggtcacagctgttggcctttagtgacacttcccttcccattgtcccagcgtcagacagtgttttcttctaccgctgcacttcctgggcccagggagaagagaattggttttgaaatccaacaaacctgggtcacgtaactaattgtcatgccctaactagctctgggaccttgaggggagcccacgccttgaagtatcctcactcctaatctgtaacgtgagcataacttaataaggttgtagagaaacagaagtgaggtctacatacagtcctgctgcagtatttggcacataataatcctttccaagtgagagccgtccatagctgtccattaccaccatcctcaccattgtaactggctccgttttagatatcctatgtcagcacggtacttctagttagtcttagctgcgtgttggatgtgcacacgggtgcatgcttgcgcatgtataggtggaggttagaggacaaccccaggtgtcattcttcaagaagccttccaccttgtttttgtgaggcccagtttcacacttggcctggaattgacaagtaggctagactgtctgtcagcaagttgtggcgacactacctgcctttgcctcccagccctggggttctgagacatccatcacacccaggtttctttaaagcttggttctgaggattgaacaaagatcctcgtagctgcaaggctacccagcccctcttcctacgacagcttctcggtgcatgctctgtcgcatggtggcttctgtgtatgcgctattcgtgtgctgttttcagtgtgggacacatcttcagttgttccgggtgtttcctcctccttgtctgttatttcagtagtgttatttcactatcatcgaagtgtgagcttgcatttagtcagggtgctgcagggtgacagtggtggagttctgtgtatatcctgctgaaaagtgtgcttcccgagctgagtgtaggcctgctgcccagagcagtgaacgtgaggcagattgtcagcctctcctcctcatcaaaatgacaaaatctctaaacatacatgctatactttgttgtattttggttgtcaggtttactagtttaaagacgtgagcttagtcaaagctttctttagcaagatcctaaaactggactcttggcttttaaaaagatatattgtgccacatggctgcatatatttttaattgcaattatcacccattataagcactgctgattatcactgagattcttaggactaaaagagtttcacatgtatgaatcttgatgagtttagaatattggtgtcatgcggtgagttttagatttcagagtatttcacactttcagtttttagatcagtgctactcatcctgtgttcatcttggaaatctttaatgtctaataaatacagagcccttctcctccttgtaggacaatagagcaacctggaagaagtctccaattcccactaatacccaggatgattaaaaatagtcatgtgaatcccatgagagactgggtgcttccgaactctagataacctgacaaggaccgcctaaggtgcaacagagacagaaaagggactcagccaatgagctgacagctaagcgagagtcgagtgtcttgctaagattgcttccgtcctcataactcagatgagcctgtttagattgactaatgaggccgccaccttcaggttagagtggagctgaagcctcgattctcttcctttcttctccatatctacaaatctccaaagccttcaacacttggctgcctttgataaacataaaacccaggccgtgttcctttgttttgggttctaattaaagtgaactttagtaaaccatggcttacccaagcccctgtcatgtgtttagccactatccatacagatgaagtgttttttagacagggatttgccatgctatcaggtaaagctgtcagggtgcctctaacttaaccccttttccttagcccgtgagcttccagatgccatgcactgaaggaattcccagcggataggaccgcaccatgagtaggcggctgacaggtgctagcacccttccaaaggcagaaggcactcggatgggtgatagtttcttccttgcagtacttctttgtccccattgttaatcacaatgaagaaacgccttctactgtggcttttagatggtgtagtcccagctctcttagctgctcgtgtcagcaggaaatggtcagtctggtaggcctcgcctgaagttcaatcgtacaattcatctttttaggttagcagtttgatcctagatcagtaaaatggcctgtcctggaattaaaagacagctttctaaatgcacgccagtattctttctgctaccttatggaaatcttccttggctacaggaatgctaaacaggcagacatgtgatgccactggtccaaaggacaaaaaaaaaaaaaaaaaaaaaaaatggtccttttggaaatctatgatgctttctctgagtccaaataagtgtgttataatctgttccttaggtaagaatgcagagtggctagctcagaaggttttcaccctgggacaaaaaggatttctagtaatatagttattaatacttctggaactggttggaatccttatctagactcttaaagcttagttggtattgttattatgacttctgtcataattatgacataccatattagttatggcttctgtcagactaaagggatctctaaatatcaaccagcattaattctactcgttctaatcacagatgttaaagagggaaagtgttccttgggtgagccacgccagtgcccaaacattgggtaagcaggccattttaatgtctgcgaggttgttaagcaagaagtgttaatagctcattttatgactcagaaaatggaaataaagtagtttgccatatttctccaaagactcacaagtatctcagatttggaaataggatccagatttcttggctcttcccagttctcctacctagccctggtcttgattctctaatttttgtctaacactctagacagttgcattctctcctgtgcctgtggttgctagcctggttcaccattctctcctgtgcctgtggttgctagcctggttcaccatcctctcctgtgcctgtggttgctagcctggttcaccatcctctcctgtgcctgtggttgctagcctggttcaccatcctctcctgtgcctgtggttgctagcctggttcaccatcctctcctgtgcctgtggttgctagcctggttcaccatcctctcctgtgcctgtggttgctagcctggttcagagcctctgttactttagtgattatggcactgattttctgtgtttgtgtttctgatattttttgtccactctgtgcttgtatgtagttcagatcataatacactcctctttctatcttagttacattcctcattgctgcaacaaaatgcatgaggtgccaagcagcctgagggagaagggtttactctggctcacagttgggggttccagtctctagcctggaaggcacagtggccagagctagtcagaagaatgaggagtaatgaagtcctgtcccgcacactttcttctcttctatacagcccgacatcccagtctgtgggatttaaaaactctgtcctattttaagtctaaactgatctttgtctagaggtcctgaggtgtggttgaacaccatcattgttcttaggtgacctgggtgaggggaacagtgcgaatggaaggaagctaccaggtagagagcctggttggcttctctcagtcctatctctgaatggacctgatttactaagcaagccattttcttgacccttcattctttcttttacgcaagatggaaatggacagagctgatactgtacacaaaacactctgcagaagtgtaagcaatccctggagtgtgtcctgcacaggacatcgtggaatctgagaaacactggtggtgaggggtcactatatcacaagcgtggggtgctctgcctaccccacacagtgtgctcttaggcagactgcctggcactcttgagccttcatatctcatattgctatggtgaccaaattcaccagtgcacatgtaagcactttataggcacaagtgtgtaaaccctttccttaacagtatggacaagttctaaggagtttgctttggtttctgttttgtgtttcattttactttgtttttgtgattaggtctcactggcctcgaacattgataagtaggccagactagcctcaaactcacaaagattcctctgcctctctgcctctctgcctctctgcctctgcctccccatagttgtgattacagccatgcaccaccacacctggttaaagagatattgttaattgttttagtcgtaattttgaagatcctgtgtgtactgattaaaaatttcttaaaagaatacaaaagcatttacatgggctggcaagatgtcccagaaggtgaaagcccttgccaccaagctcagtgaaccaagtttggtcccagaaccaggtcccacatgtcctctgagctccacatatgtgcaatggctcagacacccccaaataaggaagtcaactctgtaatacatgtcagaaagtagcatacatctcaggacatgcttagtatctttgtatttcctagtacagagagaaaaaggccagaaactaatttcagaatggtatccaagcctagtataaaccagtaatgcaacagaaaataactttggtattattggcatagtggtacaaagtttattattcgaccctgattgctgctgctgttgttgttttaatttatttacagacaaagtggagtcagaattgctacaaggttatagtaaatacttgccacatgatgttattgtcatggctgtgaagttgtgcatactattcgccgtgcttctgacagcccctctaatccacttccctgtaagtatgcctaaaggttttgttgcttagtgtcgtggctccctaatatggcaacactaatgctttgcagaccagaacctctgaatcacatctagccttgtgtatcttattcatttgtcaggtaattgatccaagacctcatactagcacatggtcccatgaaagcacagaaataacagtgagcctcgacggacgctaatctgtgctctctgaggttccctttagatttacctctccctcagttttgtttccaatttagaaactatagttctaaagttttagggttgcagggggtggtgtcttcctatattctgttttcaaaagaatgtgcacaaagaagagaaagtcgattcagcaaaaataagctcttcttggtctacagcctcttcccataggggaagctggttcactctaaggctttatactcgctctaagatttaggaggcagagcagattcccattctgcatccagtcgctgcacagaagaatctgaagaatttccgtgaaaatgaaaacaacagctttgggtagaaaggcttctgcctgggtgtcttgaactcacatgagttcttacagacgggacctgcaggaatccttgccctccctgtgagaccgcagggtcaggggtccggccggggctgcagaaacgtgtgggctgtggctgccagtggtctgccctggcagtggaagatgtgggaatgcttttgcattccacaccatggaacagataacaaaacaaaacagaaaatggtgtttctcttccatgccatgttttgtttttttatgcttgaaagtttgtctgttgaatttaatgaaagttgttctttgtgatttcgtaacgcagtgttatggcttgtaattctttaaattatattttctggaaaaatcgcctgtgaaactttgtgtggaatttaagaaaaataatttttatgacactctctcagaaaggtttatgagaataaaaacaccgcataatgacagtttatgctgtgtctggggaatacaaatgatttggggtaataatattatggttactgtacatgtgctcctctaagcaagtgctgtgccctccatcctccacccttcgcctgacctccttcccctgctcttaggccaggaaagctttaatgatgatcctgttctccaattacccgttctcctggatccgacattccctgaccacagcagcgctcaacgccatcatcgtggtgctcgccatctatgtcccggacattagaaatgtatttggtgtggttggtaagtttcccactttaaaaaaacccatgtagtaaaggggacggggatgtttcatcagtggaagagcgtctcccagcacgggtgggctcctcaggtttggtctccagccccacaaaagccagaggggtaataaagtcatcactctctcagctgagctcacacggcctgtttcttcctctccaggcgccagcacatcgacatgcttgatttttgtgttcccagggttattttatcttaaactcagccgagaggacttcctctcctggaaaaagcttggggtaggttgtttccaactgtttaaaaaggcttctattttaaggaatagtgtgtttattactgtatctaagaagacagaatatcttaatttacaaagttcattttagagtctggcatgatggctcatgcttgtaatcccagctcttaggggattgaggcaggaggattgctgagtgttcaaggctagcctgagccacagcttgagaccccatgtactgacactgaatgaaagtccgcagtggagaggacggaggctcacactcagcatctcttctgtctccacaggctttgttcctgctcctcacaggcgctgtggtcggaagcttcagtttagtgctcatcatttttgactgggtcaacaaatgaaaaagtttttattatgaagactaacttacctctctataaacaagaagggatcattgtggaaggtgccatatatgaaaattacactcaggaaaactgttaatagggaagccggacagagcagcaataggaatttagccattttaattttaaccaaaattagaaatactcaaaatacttgaaatgttcttaaatgtgcagagtcactcttttgtttggaagtttcattttctgtgttttgttctgtgtctgaagcaggacctagctgtgtagaccaagctggccttgaactcacagcagtctgctattgggatttggttctaagacaaaggtcttaatttggttcccaaagcctggcttccaggcctgagggtccctgtcctcagctggcttcaattgataatttacaaaaaaaaaaaaaattgccaatggctggacagaaaaatggaggtgggacttttagattgtacgggcaagggacagagagggggagagaagaatcgccatgattgagggggaaagggatcagatttaagagctgcaggagaaagttatccagcaatgtaggttgaaagggaaagcagccctgggggttgggggtggggtgggtggggctgctggcccaataagtaactgggcagcactcgggaggcagaggcaggcggatttctgagttcgaggccagcctggtctacaaagtgagttccaggacagccagggctatacagagaaaccctgtctcgaaaaacaaaaacaaacaaacaaacaaaacacacacacacacacaaaataaaacaaaaaacccatagatttagaaggtgttaagccaggaataccagagggaaatgtatgctagcctcggagaggactagaagtgcccagccattgagctagttaaggcatgtcagaatcagctggaatgtagactcatttgagaatccagatagctcctgggcaggcgcagcttgagtgggacttgccaggagccaaagcgggttaaccaatcaccgctacagactgcctgctgctgctcctgccaagtgctggggttaggaactctgccaccatcctggcacatgcctggcatctgtgacttaaaaaaaaaaaagtagcctttattttttttagagtagttgtgcatttccatacgtattgagcaaatgaactgaaagattctatgtgacttcttactccaactctgtagctttcctgctatgaatgaatgccttgtgtcggtgtagcacgtgttacacccagggatgctaaagtccaaggttgacattaaagtttctcttggccaccactgattttcctaccagaatgtcatgattgggatcatgtaggactgagtgtcatgtccagtcctgagtgatgccccattatatggctgtatcatgtttattgatccactcacctcatggaagacctttctactacttccaggttttgccagccatcaataaaagcactaaaaatgctgtttgtatgctggtttttttttacctggtcatgttttcatttgggggtgggggtggggtaaatgccaaggagcatatgtgaaggtatatttagttttataagaaactgccaaactgtgttccaaagcagtggtaacatcttgcaccatcaccagcaatgagtgagtggcctgtgatcacatatcctcactggcatttggggttattactgtaggctggtgcgttctcgccaatttaatggcgtctctgttttgagattccctaacggcatgatatagacattgcacatacttctgtgacctctgcatattttcttagataagtgtctaattcttgcccatttttaagttgggttgtttgctcattgttcagttttatatctgtgtgtgtgtgtgttggatgcttttgtgcggttaaaagttctccaggcctcagattgtcattattatatgtgatattattcttggaaaagagacagatattgatggtccttctcattcagtgtttagaaattagtagaaattgtaaaacactgcattttgcccattgccacgatgcccagttggaaacttgaatctcaggctttctgccatgagagttctgtgtaaagggcccccatgtttggcagcctgccagagccagggtgcctcagtcaaaggccctgccgcagctgacctgtaaagcagggagtctcatgtaaagtaagaatttgcatatatggaaatacacacttttgcaggtgtcctcttgccttccccttaggaaagaggctaaaaattgggtaacagcgcttccctttggaaaagatcaaagagaacattgacaacttgggtgtaatggggagaggccaggatttgggttgggatggggagagacgggctgggtttggatcttaatgaaacgactcttaacctccatgcttctactttgaactctaggaaaatgaattaatacccatactttaaggactgtgtggggaaggttaaataacctttgatagatagatgcagacaaactcttttttactctttcttactactgtttgtccctttgcttggataggtcccttctggagagcagtaaagtggaatgcctttctacccaagggtcttggctttttcaccttctgtcctgcatggctttaccttctgagtccctttagccttcacccccgaggagctggccctggaagcagaggtcagtgctctcccacagttccacgccagctgtgtgcttctcctgcttacgtcattctgaagctggccacatagcgtgcaagcctggcccctctcagcagcttcaggtgagagttcgtcgattaacgagctccttgccccctcttttttttttttttctgtttatgaaataatgctcataggtgttcagctgcttaaataaatcttaactctagtaataccaaaatagccctaaatctacaacagatgcagggatgcccccgggggcaaatgttaagtgtggcgacagctgggcatcaattaatactgtgtcacctgttcctaagacagtgccctgggaggtttggcaagagacaaatatcctttgtaacactgcacagaattgagttactaccacggtggtggaggtggcccactttcctttaaccttctgtcctgccgggttgcttgcttgagtcacattttctgtgagtttggaggaagccgatgagaaggctggcaagaaccgtgaccccttcataaccttgtccacgtacccccaacattattttctgggaaatatgggccttctccttatgagcttaatggtcataatttattaggtaataactatttaaaataaaactaagaaacgcacaaaacacacttttctaacatttggagagttatttgctaaattaaaagacaaaatgccaagaccgtaaattactttcatatgttcagggtgaatgtttaagttgtacttttttttttcttaacagaatgtttactcatgagcttagcatttaaatggttaaaacaagcctttgaagttaacactccattaagatgaatgggggtaattcacacctctgcggggctgtattatttcagtctggctgtggagaaaacaggacagcagtgggctgatttactgtcctttaaacacccaactgctggaaagctttgttctggtggtggtggtggtgatgttggtgatgttggtggtgatggtggtgatgttggtggtggtgattgtggttagtggaagtggtggtggtagtggtggtagttagtggaggtggtggtggtggtgatgccggtggtggtggtggtggtgatggtggtgatgttggtggtggtgattgtggttagtggaagtggtggtggtggtggtggtgatgtcgtcggtggtggtggtggtggtggtggtggtggtggtggtggtggtggtggtgaaggaggtggtagtttcttttgtttgttgttttcctttttcacctggaaacaggatcttaaagtcatcactgtatttaggtgcagaactggagtcttgaacagtggtagattgtctactcaagtgtgccccttggtgattctgcctgtgacagttgatggctgtggccagatcaactcaaagctttctggctttgttcagttccacactctcatgtatgctcctgtaaagtgtagctttcccagagcaaggcagggatgatcattttcaggtcaattgacatatgctctagtaaggtaagaattaattggctttctgctactcttaaaaactttacttttacaaagttttatgttcttgtttgcctctatataaagatctaccttaaaagccagctttaatcccaataggtggaactctctgaattcaaggccagtctaaaaaaatcaactaacaactttcttatggccttcaggatgactcagcataaagtcccttgctaggcaagcatcagtccaggtccatgacttgtcctcagacctccactcccaacccctatcctgtgtgtgtgcatgctcgtgtgtgtgtgtgtgtgtgtgtgtgtgtgtgtgtgtgtgtgtctctctgtatgaccgggggggggtgtagtaaaattaagtttttttaagacactttcctgtattcctgcatagtgaggtgaacagaatgagcaaggaagggtggattcctttctcaaggtatcatttgtaacagcgctcatctgtgttggaagtgtataacccactcattggaagtgctaaagccatttaacctttgaaaggattcatttctgagcctaggaataaaatgttcttaacacacataaagtggctaacattgtgtgaaagttagtgaatttgaaagacctcttttcaaggtgggcaggtttccctccctttctctgctctgcgtgtttgtgggatcaggttactgggtaccctgcagggagctgggtgtggaggttcctcctctgctgtctgcaaggctggtgttgccagtgggctgtggggagatggaagggagactgaaagggacccacccgagctgcaccgtctctaccctgagaacagcattctgcagttggaatgcccccatgctaaacaggcagactctgacgtctaatatctgacctcaggacatctccgaaccttttgtggtactgagaagtttgtttttctaatttaaatgaacgattttgtcactcttctgcctgtactctggcagtctttccgctgtggggtggagaaattggaaaaggggctgggtggaggatgagtagacctgcaggcatggtttctttatggagagacagttccttctctcacctctctcttggtgagctgttgtccaggctcaccatactgctagtcaagaagagcaagaggaagagcaggaagactcagcttggccctgcgccaagtggacaggtgggcgtgagagctcccttcccctgtgggaccaagtaaatggggataaaggtgggaggggtgggggcagatggctgaaaagacaagaaacatgggatgctatttaaaagaaaagttagtggcctgtagaaaatatctctcacttgtttgaatgtatatatgtctatctaatgtcattagtggacttaagtgcagaagcaaagggctaggtatgtagttacctaatacaataagaaaataatacaatacatacaatacaaaacccagggattgccctagtcccaaaaacataaagctaggagctagctgtccatcttgcctgagaagagttcagatacaacttgaacttttctgacctttcagatggactgaatgattgaaactacttaaagaggtaggtgtgtgtgtgtgtgtgtgtgtgtgtgtgtgtgtgtgtgtgtgtgtgcgcgcgcacctgtgtataagcagagttcaaaaaagtgtcacctctatcactctctacctttgaggcagagtctctctgccacacccagcatgttacatgagtgcggggtttcaaactcagatgctccaaattagccagcattcacatggttcttaaccatcttttcagcccagtgagaggttctgggtcaggcttgcctggaactcactatgtagctcaggatgacctcaaattcctggttctcctcctgcatcagactcctgagctaccacaccatgcatgcctggctctcgctgaagatttgtattacttgaaaaccagttttctctcaaccaggagaaatacacttgatttcttcaggtggtgtggtagttgggagagcctgagtcagctgctaaatctctgagtatggacacttttcttactactgttccgcagatcagctggctcccagccaagggcctcttctgctgtgtcagccacttaggcaacagaagacactgttcttgctgctcaaagcccatttttattgtaataacattctgagtttcagtagctttacacctttggaacattgcagaatgtggctaacagaaactacaggctttttacaggtgaattactgtagtcttgagaccctatgtttaaactgtggatttaaagaaaaaaaaatcttttaaagatttacttagtattatacataagtacactgtagctgacttccaccgcaccagaagagtgagtcagatctcattactcactcttatatggttgtgagctgccatatagttgctgggatttgaactcaagaccttcgtaagagcagtcatcgctcttacccactgagctatctcgccagccctaaaatatttttgaaagaatatacatgctgctagagatgaatgttaagtgtcccccaaaggctggtttattaaatgttcggtccctagtttggcaccattgggaggcagcaggagctttcagaggtaggacacgtgaaaggtcctctggtcatcagacacatgccattgaagcttggaaccatacccctccatatcttcattttctgaatgctgaaaagagatccgttccctcccccatgttcatcatgtactccaccatcagcctcttaaagcaaggagaccaaatggccatgggcagaaagcttcaaaactgggccagaacaaacttctactgtttttaagttgactgtcttgagtaattcctctatgtatgtgtgtgcgtgtgtgtgtgtgtgtgtgtgtgtgtgtgtgtgtgtgtgtgtgtgtgagtatgaagaaagattgaatatgacgctattacatcacatactgtccgctaaccctcccagtaactgacacttgtttaaaatcatgactctagtgcatcagccattgttcctgcttttttgtttttttgacatccttccttttttttttttccatctcattcacggaagaaaaaaggccaagtgagaaagcgagtgttccacattgttatctccttctcccagtctgtgttactatccctggagagcacccacccttgagtttctcagccgcgagtctcattaggaacaagcttcatgcatttgtctgttttctgtatctctagttgctccacgaccaccttgaactcgccacctgggaatctgtttccctgcgcagctaatctctctgctcacagcctgctgttctcacccggcttcctagcctgccatctcactctcaccgctgctgcctgcaacccaggcttcccatcttaggagaaaatctgcactgtggtcagcaaggctcgcatgtacagtgtcatattataggcgcgtggtgtggcacatacctagagctttctttctcatctgacatgactaaaattgtacaccacggagcagttcagatttcctcagccctgcagccttgggctacccccactgtcccctcctggagtgcatcgtgtagggacggtgtataaaccattatgtctagaggagacttttcactgtctgcccttcagagcctgatttgtttggcttagcatattctccagttttgcccaggcacacacaagagtgtctctttctctcaaatctgactgtgtgatatgtacacatcaggatttcttcgttcattgaccagtggacatttgggctatttccgcctcttggctactacagacagtgcagtgatgggcttatgaatacaaatagcccttcgtggcgctgtttgcaattatttgggcgtatggaatcatggggttgttctacttttagtctcggagttggtctctagctgcagtaccaccttacactctcccaagactggctctgctctccccttatcatcgacagtgtttgcagcagccatctttctgggctgggatgccatgtctcagtgaagtcttgttttacctttgggagatgactcgtgctgtccggtatccttagcaacttgtatgtcttctttggagaaactctcagcctagtcttttcgttttgttttgatttgattttaaatccaattatttggggctacaattccttatatatttaggatattgactgctcatcaggtttatagcttgtaagtactgcctttccgtctgtggctgtcttcacgctctgttcattgtttccatctattgttttgggaaccgaagccagggtctcctgtgtgttagattagttctctagagtgttacctgctcccggtgattagttcttataattggtcctcagtaaatacacacgagcccttccctcgtggcacatttagaaggttctcctgtggcttttatgaatggtgtgagaattgccccttttgcctctctgctgttcccaggagataaggcgtgattgtaggtaagatgctgtagcagccttctttgctcatttacaatggacagaattgagttgctcacagccctagaggccagaaagggcaatatccaggtattgtcggagcgggtgtctcagaggggctgcctcgtctcctgtccagcctaggacgctacaccgtgcagcggggagaggctgttctgaatactaaaaagttcaagagccacagagaaaacgcagtcacctctctgtcaacgatggcggagccttcaagaccccatcacttcctaaaggcccagccttcaaaaatcattccccagaggtgggcatttcagaaagagcagtgcgaggacaaacaggaaccaccaggaggaagacattattactgctcttccctgattctggattatcagtgatgtggaggcaaacaaatccttggttctattatcatgtttgtttagtttgaatctctgtcataaaggtttacagctgataccaaacacactcaatgccctctgcatcctatgactcaggaggtcatgttttttggtttttgggtttttttgtttgtttgttttgggtttttttttttttttggctgtttactgtaaattaaaggagaaaagttactccatgagtataccctaccttttcattgtgaaaattttcagacatgaatatgtattgaactaatctgcccaagtacacatcattgaaatccagcatgtattcaaatctgacttgttacccatatccaaataaaatttatttttaaaagatttttacttatcatgtttcatgtttttgtttgtctcagtgtatacctctgtacgggtgtccttgaaagccagaatagcctggagccgatgttacaggcagttgtacgctgtctggtgtgggtactgaaaaccttggaaagtacagtaagcactcttagcagctaagccatctttccagccccataaattaaatttctatgtaaatatatgtgcaggatgatttccagga

SEQ ID NO: 3466 - DNA, 1413 bp, Mus musculus
cgcacctctcttccgggcccgcgatttgctacgagagcccggaagggccaagcccgtagctccgcctctgaagccgctcagccggggcgcttggggttaggggaagcggctccgtgatttacttagcagtcggtcgcggagcaccatgcaggcgtcccggcacagcatccaagcggagccaggctggtacgtctctgcccagcagccagaggaggcggtggctgcagacgagtggagtccgttgctaagcaacgaacctcacaggcagggatcctccggtgcttcctttggtctctccgtctttaacgtgatgaacgccatcatgggaagcggcatccttggtttggcgtatgtgatggctaacacgggtatccttggatttagtttcctgctgctgtttgttgctctcctggcttcttactcagtccatctcctgcttgccatgtgcatccacaccgccgtgacgtcttacgaagatctgggactcttcgcttttggattacctggaaaggtggtggtggcaggcaccataataattcagaatattggagctatgtcatcttatcttttaattattaaaacagagcttcctgctgctatttcagaatttttacctagtgaccacagtgggtcttggtatcttgatggacagatgttgctgatcatcatctgtgtaggcatcgtgtttcctctctcactgcttcccaagatagatttttctttatggtgttctttgctcttgtggtagtaattaaaaaatgggccgttccttgtcctgtgaccttagattgcatcaatgaagtctttcagatttcaaacgcaacagatgactgtaaaccaaagctctttcatttctccaaagagagcgtttacgccataccaaccatggctttttcctttctctgccatacctcagtattgcccatatactgtgagcttcaaagcccttcaaagaaaaggatgcagaatgtgaccaacacagcgattgcgttgagctttctggtttactttgtgtctgcactctttggctacctcactttttatgacaaagtggagtcagaattgctacaaggttatagtaaatacttgccacatgatgttattgtcatggctgtgaagttgtgcatactattcgccgtgcttctgacagcccctctaatccacttccctgccaggaaagctttaatgatgatcctgttctccaattacccgttctcctggatccgacattccctgaccacagcagcgctcaacgccatcatcgtggtgctcgccatctatgtcccggacattagaaatgtatttggtgtggttggcgccagcacatcgacatgcttgatttttgtgttcccagggttattttatcttaaactcagccgagaggacttcctctcctggaaaaagcttggggta

SEQ ID NO: 3467 - protein, 256 aa, Mus musculus
WTDVADHHLCRHRVSSLTASQDRFFFMVFFALVVVIKKWAVPCPVTLDCINEVFQISNATDDCKPKLFHFSKESVYAIPTMAFSFLCHTSVLPIYCELQSPSKKRMQNVTNTAIALSFLVYFVSALFGYLTFYDKVESELLQGYSKYLPHDVIVMAVKLCILFAVLLTAPLIHFPARKALMMILFSNYPFSWIRHSLTTAALNAIIVVLAIYVPDIRNVFGVVGASTSTCLIFVFPGLFYLKLSREDFLSWKKLGV

SEQ ID NO: 3468 - DNA, 122550 bp, Homo sapiens
aatacttgggctgtttcaaaacaatttgaattaagtaagaatgagtgttccagttcattacatccctatactgcttatcatttattgccttcatttgtttacatgacctgccagacttctgaaggcatttgaatttgtaattaatgatctagattagggttcttaaacattttctgtagggccagatagtaaatattttaggctttgcagggtaacaagcaaaatcgtggatattatgtaggtacttacagaacaagctaaaacaaattgccacacttttttttttctttcaaactgtatccagctttattaaagatactttccataaacaatcatggtatttcaggcaggacatgggcagacagtcattaacagtatacaactttcaaactctcttcttcaatggactaccaaaaatcagccactataaaacccaatgaagtcctcatctgatgctctgaacagggaaagtttagagggttaacatttcacatttagcatgttgtttaacaacttttcacaagccaaccctgactttcaggaagtgaaatgaaaatggcagaatttatccgaagatccataatctagaaatggaaccactgctcttttgacaggtgccatctcagtggcatcactggaaagtccagattgccagacacactggtaaccaatgaccgggggtcaggtcccaacagatgtctgggcttaaggggattaagtctatgctgaaagatggaaagggaaaagaagacataaaaacgaatttgtttttccataccacaaggcttttgtgccaaggtggccatgtgtgtcaaagtcaggaaatccctcctcctgggagccaagaggaagtctctcaaaactagaagggaaagatgttttccccgtatcaatccagcttcagagatattctattagtgacacataccccttcccccaaaaacaacaatgaagtgttctgtgtgctaacaacatagcttaaaaaaagtaaaacaaaattctgcatttttataaaacttgataaagaatatttcaaactgtacagtcaccagaagtacagttataaaaaatgcacacacttcacttgggatctccagcaccttcccgctccttgccagcatcagcttttctctttttccctttgggtaccttctctcccttctttgcaggggcctttttaggcttgggctctggctttggaggagcaggtttagcagacaacctcgcagatcttctctgtgattcatccttcaccttggctttatctcctttagcatccccttcagtctttctcttgggcatggcggcggcggcggcggcgggatgtgggcaccgggtgtgggacgcagcagcgcgcgggctttggtcggtccaggggtcgttcttgcctcttctccttcacactgctcccacgcttttttaattgacaaaattcaaaatatagcccaattttttgtaatgccttttttggtgagaataacattgcctctaatcagggttctaagtaagtgttccctgtgatcaaaatcagttgtaaatgattgcctattaatggttatcattaaccatcattaaccattaatactaatggtaataagattttacacatttcatctttaaaaatgtcttctcatacagataggtattgccaaatactgctatcaatccaggagcatatgaaattaactgagcatattcatcacttggaaagcatttgtaaaattcttttacatttcttcccttgaaatttgccttttagcatgtcattattttaatcacttcttactgaaaattaggttgaatcacctcaattgcagttaaatagattttgaaacagggaaatttcctttgcacttgcacctaggtccctaaaaatgctgaactcagaaaatatactcactaaaatttgtgggaatggaaatcttgtttctttctctttgatagtatgacaaatgtgtaaggatattgtcatcaaatattgtgattcaaatatcgattgtcaaaatgactgtaccatatcaaagttgttttgccttgtgttttaggccattcttgcattgctataaagaaatacttgatactgggtaatttataagaaaagaggtataattggctcacagttctccaggctataggaagcatagcactggcatctgcttctggggaagcctcaggaagcttttactcatggtagaaggcaaaataggagaaggcacttcacatggcgaaggcaggagcaagagagtgtggggggcgagtgccacatactttgaaacaacaagatctcataactcattatcgtaaggacaccaccaaggggatagtgctaaaccattcacgagggccacatataagggctcacacctgtaaccttcacacattgggaagccgagatgggaagatctcaagcctaggagttcaaggttacattgaggtgtaactgtgtctctacactccagcctgggcaacagagcaagaccctgtctctaagtaaaaataaaaatagagtcaaagaaccatccagaatcatttcctttttaaagtgactatttatgtcgctttcaatgtccttaactctttaagcaactgttcttgccaaaggccagtaatcttaagtttattttctctggatatattcagctgctgcatccaaacataattaattcacaccatcaataaatggctttgcttggctaacaaatgattgacttagagacttactgttgttgcagcctcattttcattttgcgaagaaattctgctttgttatttccattttaaattttctaatttttctaacagttgcttgcctgtgagttgggaatactgtgatgagtggtttgtctggtaatgtcaatggttattcttttagcttagctatatagatgctttgtcgtctaattcaacatcaaaataattcacaccctactgtactttaaaaataacaacaaagtccacttttcttgttttgctataatagatatgctctggtaataaaaaataaaatgtgggttcatgtgatatacatggcactcaaaatgctgtcgttacaaccacatcagtgatttgtgatgtgtcaaacagcagtgtgaagtgatgacagtcacattcagtgtgtgttgcaaccactcaactctgctattgttcaagaaagcagctgcagtcctcacttcagcagcacatatactaaaaaactggaatggtacagagaagatcagaatggtccctgcgcaaggatgacatgcaaattcgtgaagcgttccatattaaaaacaaaaaacagctgcagatgatatgtaaacaaacgagcatggtatgttccaatcaaactttatgaactctgaaactcttaatttcatacaattctaatttttaaaactgatacataatagatgtcataaaattttcacgtcacaaaatgttcttttgattatttttcaaccaatggaaaacgtaagaacattattaggccacaggccatatgaaaacaggtggtgggacagatttggcctgcaggatgtagtttgcctgccccgttctaaataatttcattttttattacttttatggtgatagttaattggcagtaaaggagtagttacgtaaaggacaactacaaagtggtgttaataccttcctagttagtactcaatcaccctactttcaaaaattattttccctgagagaaaatatttattcatatttatccaataaaaattagatatattttgttataaaataattgtatgttataatttagataacagggaatgtatttggtagccttagttcagttaaagtttaattggtaatcctcaatttgtaaaataaggcaaagtacaagggttcaatagtaaaaaccaaaccctaaaattttattaaataatacaaattctatttcactacatgtaagtctggtagggagatggagaaaacatttccaattaagtgtttgaaacaatttgtgttttttcgtctgaaaaggcttcagccgtcctctgccttttaagaggtggatcttcatgattctctgtaataaatccagaaaacctattttaggtaagatattaacagttgaaaatactcttaaaaaaacaaacaatataggcatttttaatctagtcaacttaaacatgaaataacattcttgcagatttactattttaatgaaatagccttctattagactgaactaacacagtagctttctattagactgaactaatactgcattaaaatttgtaaaactgggaggaattagttacaattgaatggcaaggtttacatttaatttcccagaaactgctcacctggatttctggtctggttcttgtagaggacagaggcaggaatctgaaacgtgatgcacagcatttccttgtttggggccacatttcttaccaggtgaactgaactgcatgcctccagagaaatgcctaacacagctccagccctttgccgaacatcctcagcagggttagcatctttggaaaagctataacaatgcactatgggaaggaactcactgctgcatggctgcccatctaaaagccacttgaaagcactaagaaactctatagcttttgctggcaagttcatgacaacgtgcacagagggttttctttcttttgacagacccagcagctgcattaactcttctttgactggtccttggaggaagtctttcccatccaagttgaagactttcaccttttggtccactttatttaatttacagttgtacaacagccatttatgagattcaggattgagatcattggcaaatacagtgcagtttttctttgctactggaatggcaaagggcccaaccccagcaaaaacatcaaataggacatccccaggtttgagaagttctgtgatacggctgtgttctgtagacagacgaggattccaatagacttttgaaaaatcaaattcataggtgtagttgttttctcgaacctgaaaaaaggtgttatgctttttggttaatttccttggtcctaaatcctaaccattgatattggataggttgtgtatacacacaggcaaacacatacacatttaagtttactactgtaagagccaaacaacagtgcatttaaaggcattttaattagactcctggtgtttatgctattcctaaggccagttaatatactgcattagacttattcgtgagaaaaagtcatctctttaaagccaaatggctctccatctcaatcctatagggccatggccataaagtagttaccatatcacatgaggaatttgtcagacaggccaattaactggcttaattatactcttatgtcaccagatagacaaggcaagacctacaattttgaaacaacacaccacccatatcttcatgctgggtagccaagttgcagacagtacttctatgcagcaaacaagcttccctccttatttagttttgtgtttgtaaaagggagccatggtagatgtgtcactcaattttgaggtattttactatgtttttcgacagctacttgaactttgcaaatttgatgtctataaattagagccagtgtatagaatgaatcattcccagattctctttcccaaatttgagttttcatgggtaaactaaatatatacagtgaagctaattcttgaacaaaagactttttaatgtttcttttgggtctattgtagtagacaccttaaaaaacagaaaataaaacttaagttacagtcatgaagtatgacctcagccatcatcttaaactcattaatttatgcatgaagaatcaaaggccagaaagttcataagttctataaatctcatagatagatacatcttccatcttctgctttccaggaccttaattcccaatttgtatgtattttttttttccttctcccaaccatatcagatgcttccggccaaattattaaggttacagaggtggaaatgtttctgcaaatttctgccaactaaaagtctttctgggtataacctagaaggtttaaatatatctcgagaactattttatacatactgttctataacttgctttttgtcacttatattgctttctggcaattgtccattgtcaacctatcgatggacaacttattttaacaaatatggagctaaaaaacctttaatgatggaaatattccattgtatcactatatgagaatttaaccaattcttctgaaaaggctttatcagtgttattccatcaatagcatacataagtgatcacattctcacatactcaccaacactggatgttacaagtattttaaatctttgtcatctattctgactctaaacataatattgatatacaccttacttggagataataaaatatacctttgtcatcatgttctgctctccagatagcacttccatttggaaatttcggtacatattgtcaatattatttattttatttactgctgaggtgattcctggatttttgtcaatcataacctggcctaaaagaaaaaatgaaaatccataatactgcctattggttgcaaaataaaagctaacattgttaatatgaaacagaaatgagttgtatttcttttggttgataaagactgcacctactgtgtgtaatgtggcatgcaatttaaaaaattcaacagatgactaaagttaatgtctgacggttgctaatatgcacacacaaaatgttgggtacatttttaaagaaaacgttttgaggagtttgggtctacctaatgttttttccatgttttactaaatcttttcaaatgaaccaataaacaaggaaccaaaaaggtagatcacaaggaattgggaaagaatggaaagagatgtaaaggaccctggcaacaaatggcctcagaaaacagtaaaacatctgccggttccactggcctcaagccaaatgtctgttttactatggctttggaacaaatgcccccactttagaaatatatgccagcaaaacaatgtttccaaaaaaaaagaaacatagattatttacagtcctatctaaattaaatgttcatttacttcagagcaaaaaaagctacagaactggcatactcatggccatttgatgaatctatttttttagttagcactttaaaaaagttataaaaatctatatgctatctcattgcataacttgatttgtaaatcagcacacagtacccaattatacaatatcctgaaatacaaccagcatttgtcccatttctgataatcagatacttgttttttaatatagtatcaataaacgaattaatcattgttcttaccctttctgcttcatgtatctgaactcaacttttaaggtacagaatttagtttgaaatgaggaatgaaatttataaatttttaaaaactattctgaaggtctatagtaaaagctttaaaattactactgtatgaaaatgtttcacttttaatgtatgagtgcctctatgaaagaaagtttataaaataggaatgccagaggaatgtttgagttagggtaggcagtgactcacaggaaagcctagacttgacatttgtacccagtcacaattacaaggatctgcttaagtatttatgttaccactatccattattactcccttcatcaataaaaacaaaagaaatgtgtaacaggacagtatggtgcttgacatatagaagaggctcaattggttgaatcaatgaaagcataagtaaacatcttgcacttttgactataaagtacccaaatttatgaaacctagtatttaacatagccctgaaggcctaacaagtcttgtgtaccaaaaagatctctcctcaatgtagctgccaaagcatgtgattcaagtttaatctacactgatgtattgttgtacacaaaagcctggaccagtatttggaacttgctatgactaaagaagatatttcaaaatggccctcaaaagagggtatgtagctcaagatctagcttaaagttaacatgataaaatgttctgcctctgtaacttggcattaaaaaaaataatttttaaagctaaaattaacaatttgcaaattcccttcaaatacatgaatattactatgacacacgtaccaattaaatgtttgaaaggcagctgatgatctcgaaggtttaggtgtgcaatatgtccaatcctgctaaaccctgaagttacatcttgaccttcaggaagcacagctctcaagatttcttctgacttaaagtgttcatatgttagttccaaattgtatttagagatctgtggactgacattaagctgctctaaaacactgagttctgctttctcaaaggaatcatgagtaaatattttatagggatccaacatgattagtctactttctttatcttccggatcttcaatcacacgtcttatgcctgggcgctgcaatgctgccctttttagggatcgcatcaatttactgactatttctttcctcactttaagcactggaatgttgactgtctttttaaaagctgttctatcaagttttgtcatgcctcggacatcagaaggtggtgaaaacaattcagtctctctctcatgtgtttctgtttctggcatggttgagaatctttttctttgacccaataagaaaataccaggtgcttccaaaagcatctgtgtcagggatgtccaagctactggaatcaacgattttgattcagttatgctatggctttccagtttcagaaatcttcctgagaatccaaatggcctccataagatccttaaaaaaaaaaaaaaaaaattcacacacgacagcttttgagaataaaaatctaaattctactatctcaaataacgggctaaatgctgacaaataaaacgtttagtgatgtgtgggaagtatactatcttttccagactaggatgacttcttcaggaagtcgtattagtggtagataatagtggtatatattaaatttacaccttcaacccatctgctcccagttcagagggcttagtgatccattagccatactcaatgatcctcttcacccacaattttctagataatacatttgggattggaagactgaagtatgagttaaatggtcatctgtaaatgaaatagtcattatacatgaccattactagtggtgatatttattaggatagtctcatgggtgcttattgtgtcagatactgcgctaaatgctttatgtacattatgaatcttgggaggtgtgcagtattgcaccctcattttgtaaataagtaaactaaagctcagacgtaaggtaacccacccaaagtctcccagctgataagtggctaaacatggattaaaacctagttttgactgacttcggtgcttgtgttcttaatatattgctctgttgtttgttttcgatgctttactgccacatgtcctgcctttaactagaggcttctgtattttgaggacgagagctttgctgattgttatatgcatagtatcagttattcactgtcttctaaaataccaaagaatttacttgtaaggggaaagggccctgtcccagaatcctgtaaagcaacgaagtctaacttcaccgtcagagatcaaattggttctagcagctgaccagctgggtgaccctggataaattactataagtctcggttttcccaccagtaaaatgtggcgaaaggcttttgaaacattccttactatccagaacctcgaaactaagctcagcacctaggcgggtgggtgacctcgcgatgtttctgtgcccaggcagcacatggcagagagcagccctgggcgggctggtacctcccctggaccattagcccctaacgcggccgccacctcaccaaagcaccattccaattccccacgtcgctctgcagctggatccgcgagccgacccctcacctcccgctccggtaccgatcggatgtgggtcgcgggtggatgggcgggtcttctatgacatcatcactgttcgccgcgaagagggcgcgcgtcatcagatcaagtcgactcgctcctctccttccaggccctggtgaagtacggaatgccggaagggccgggctcaaagctccgcctctggcgcgaccgacgactggagcgcagggcaggggtagaggctcgtagatggaactggtagtcagctggagagcagcatggaggcgtcctgggggagcttcaacgctgagcggggctggtatgtctctgtccagcagcctgaagaagcggaggccgaagagttgagtccgttgctaagcaacgtaagtgggctgtgttcgcttccccgcgctgacgccctccggcttccctcaagtgcctgccaaataagacccagaaaaggaggaccgcaccgggacaggggagatgctggagcctgaaccctgggggatggggtctgaaggcagccgccgagattcagatgagattggcgcagttatgaacgtgatagcagcctagcatactctagaaagaaaagatgaaaagcgtcgggtggaagagatgcagcgttgagtggaagctgcgaacatgatgggatgagcggccctaggattatgtactcactgctgttagttagtatttttgtcaccttattttctccaccagtctcgtgaggtctttgcaagagtcacaggattttcctcttccgacttagtcatggggggagggaaagtaataaacattttaatacagaaattcttagcggtagaatggaagtggcttggtagtaagtgcatagcacgttcctgaccctaaagcctgtgcagtgggcactccgctttttaactcgagtcctagacactgttcccaggactttgttcccggtgctgtttgtggggagggggatgttttcagggatactgccagaacaacgtgaattgcttctgtttataatattgtcattgcaagatattcctgaccatccttccagtttggtagaactaattcattagatatataagtagagattagttgtgcagtcctagtaattgaggagaaacaactgcccacagcagtcccaggttgactcagcaattctttagtaatcacatgagctgaggccttatccctcctctctctccccactccattcccatcctatcttcatctcttgcagtcacaaggttagtcatggcccttcctgaactctgcctgtcttgtgtactggtggaaatcattttcctaagaaaccctagattcctggagctgcagtagtgggaggtgggaaggaaaggaaaggaaattagtgttggttaagcaacgagtgtgtcatacaaaccctggtggtttgcagcttttttccataatctttcatttatggaatttcttcacgaaattttaacttcaccgtccaaacatttaacactactaaatttgtgtgcttacaggaacttcacagacagcgatccccaggtgtttcatttggtttatcagtgtttaatttgatgaatgccatcatgggaagtggcatccttggcttagcttatgttatggctaataccggtgtctttggatttaggtgagtcttcatattttagcatcaaatttttttttccattttgataatatacggagaagtagagagatagattccagaagctgctattatacaatttctagttagttatttctggggttttagcatttttcttgttattcttgttgctagtgtgtaccttggagggctactacatagcttcttaaatacacagaagtgtgactagtttttaaaaatgggaacttgatccacatttcatttataatgaaatatgacacttaagagtggcatattcattgtatctccttggccaaagtgaatcaaagccatgcagattaacttccaaatagcaattttgtgagtgcaaatacaacacataatcttttcattcctcgctgtctctttgtattgttaagtagtcttatttcactttcagaggccagacatgtgttttgtgcctgttcttttttatgtttcaggacttagcttgtaggccagtttgcccaaaatagaagacaatcctggatattctgtgctttcatagtactttgtatattcattctgttattataattgttacaatgatatgtttggaaattaatgttcccactaaactgaaatcctttacaactggaggtcaaggcaggcggatcactggaacccacgagtttgagaccaacctgggcaagatggtgaaaccccatctctgcccaaaatacaaaaattagcctggtatggtggagtgcgcctgtagtcctagctacttgggaggactgcttgagcctgagaggttgaggctgcagtgagccatgattgggctactgcactctagcctgggtgacagagtgagatcctgtctaaaaaatttaaaaaatagaaaaatcctttataactggaccttattcttagcatctagcaccacatggctaatagaatgaattaacaaattggctttgtcagtagaagcagatctatttactaggaaatttaaaatgcctagggagtctcttttatgtttatttcctgcttttattccaaattttttgataagcaaagcaacttttaagtaacccaacttgcttttattatggaatgtactcacaaactttcattatttttaaaattaaaaactatatgtgacaccttaagcaagacatagtcagaggacttgttttttgattctctttgaaaaatcataatttatgcaccagggtcttacatgcagatatatactgctgaatgtgtgctcacccagtcatagcaaccatcatttttggtgatgctaaagtgttattttgtgaagttcctgatgtcagtttaatgacatttgtacttttacctctcaattttatttattaacaagtattaactggaccacagagagaaaatttcttcaatgactggggcagttcactggggatagctgtatagaagcttgtcctgctggtgtcttcctaaaaatgaataggaaattatctaagttttttctttcacactgttggtgagaggacctcaatcattacattgtttgcacatttttcaaattgcatcattagaggtgtgttaactacattattttaatttagtttggtttggagagtgtgtgcgtttaatagatgctagaaaatacagcctaaataaatcttaagtacaccttaataagatgaaggtatgataaggaggtcaatatcactggaagtagagggaggaagggaaaaagagaagacaatgagattgcataagtaaaacttctgtttagacttaaaataagaagaaaaccagtcataaaaaggaaatattacaagattatttaatggctgattcagcagtcagcagacaagactgcaaaatgaggaagtttgcttgtatttttaaaaaagtttggtttttatttttttttattttaaaatcagtatattttcatttaaataaaattggtaaatacaaaaaagtagaaaagtatcttcttaatttccttaatgaacataattctactactcagagatagttcctgtgaatatttgactgttaagcaatttgtttttgtaatgagacaccatacaaaagacaaacttttgggaggttttgaccaggtgttcttttatgttttagcttcttgctgctgacagttgctctcctggcttcttactcagtccatcttctgcttagtatgtgtattcagacaggtgagtaaaaatgttatgctgcttcatttaataaaggagtctcttgagtttgtatctacatatagaattggatgtctcaaatctaatatccagtgagcatacatttttattagatagggtgatcggaatggagaatttgaaaaaccaggatatacagacccaatactgtgggggaatatccaagcacaggatgggaggaggtaattagcatttttacctgctttcctccacaacacaacctaattttctggagtagagtagatcatgggagggtctaaaaggtgttcaaaggatccaaaccttatgcttatggagaaatcattttctcaaggagagaacaccttctcagagctactgttgccttccctgcccccatctgcctgctagtcagaggtagggatggcagaattaggattgtaggaagtaaggtcacaaagctttaatttatttagacacattttgtatttttaattgcaagtctagaatagggtagttttttcctaagagaaataagtatgtgcagttaattcaatatatttgtgtatatactttttcccatttggaattttattatgcaattcagtcatgtattgaataagttcttttaggatccagtaaataaaagtatatgaattatagaagtgcttttctaagattttccttttgtcattaacaaatattctatgttcatcagtcctggtctttttatctgtctagtctcttttgtctttggattaggtcagctttgatgccaaaatcatgggtttaattcttatatggatgagttcgttttgctttatctggccttgtgatgttcagattttaagaagaaaagtagatacacaaaatagataaaaatggatttcttaattcatttagtgtttctataaaagaatacctgaggctgcataatttataaataaaagaggtttattttgctcatagttctacaggctctgcaagaagcatggcccttcttatgaggggcttttctgctccatctgcatctagtaaggggctcaggctgctttcattcattgtggaaggtgaaggggagctaggatatgcagagatcacatggcaagagaggaagcgagagaggaggggcatgccaggttctttttaacaaccagctctcatgaaactaataaaagtgaaaactcactcattaccccaaggaaggcaccaagccattcatgagggatctggccccagggcccaaacacctcccctttggccctacctccaacactggggatctgatttcaacatgagatttggaggggtctgacaaaccaaactatatcagtgagactattctgtgctgaaacaggtgagtgaagcccagtgatgtttcttaagaattttaagactcttcagaataattctgaagccactgctctagtttgttttcctaaaacctgtccatcatcagaaatactcatagatctttttatacacagagagctctaagcctcagggattctaatttcaaaaatctgaggtgagactcaagaatatgtttttaacaaggcaaaaccagtttaggatccatagtttatagctctaacttgtaccagtgctttggccagccagtgccagatatgtttttaacaagtcctccaagtgattcttatgcaaatctagtttaggattcatagtttatagccacaacttctaacagtgctttggccatccagtgcacgcctttgctctcaaggggcttgggtgaatgtgcagacagatgaaaatactaggaagcagtacaaatattaatcctaaagtaacaggttgttcataaaagcatcctgaatttaggaataatagctttagataaatatatttgtaaatcctgctgaaacttgaattttaattgcatgtattgaaattttgctgaatgtgaaaaaaattttacttaattgtgatactttaacatcttggtagattctttcaattcattctgttaaaagattaatactttagtcaactatgtggcaattatgtctttcaagcttcattttaaaacttcattttagttttaatttaagtaaaatgttttatttcggttatgtgggagtagtattcagtgtgtggagatttctaagtaattttaattttttactccttcggttcacatgtatttaactttaagattctgacactgtgtttgttcttttctgtaactctggggcgtatgaagtgaatatatctgtttctctttcttttttctttttctttgatttctgtagcctacttgggcccatgaactaactacttcatggttctgcctgcacattgactcacctgtcttccgttgattgaattccttcaatctttgtaaaattctctgtggaggtaggcttttccttttttttttttttttcaatacatacattcatatataaagactagagtataatacgtaactaactctctcccaacagtttgttggactgtcataaaggattattatgctcagattgaattcattggtaagagaaagagctatcatgagtttttatgaaataacttcttcatttatttgctggtggtaaagggtaaagagaaattttcatctttataaaagtaaaggatttcttcacatgaaattctactttagattttatggagcgtttggggtctatcaggacttttcatgggagctgaggtggaatgtaaagaaccttattctctctagccttcgtttgtcatctgtaaaatggcaatgataacacttccttcttggaattgttctgagagtgaaataaaataatgtatatgaaatgtcaagtccttggcaaatgagtgctccctggggcaaaaatgcccactggggcaaaaatccctaaagattgcagggtgttgtacacactactatctcagaaatagttggttcgttgccattcttttggaatacttctcatgctctgatactaaacccacagctcccctccactggcttccatgtcactgtcaactggagagagtgagagtcctagaactctgcatacctctggccgaaccacaactccctagtcgttgatccctactactcactggattgtcaccattatttgccttgagaccatttggattatgacattataccatctatctcaatttgtgttagtcatttcaagtatattaggttatctttcatttctcagactcatcccatatggctgtcatctgtttctgacctcgtcttccactgctctctaactcctgaaacccttccactgtgctctctggaactcacagtcaatcatcagcaaaactcacatgtctctaattctcttctgaacatttctgtctgtttcttacactacgagaacctcctctgaggcttccctgtagttctctcaagtggtcagtcttttctctttatgtctctcatactaatttgaagatggtataggtgtcctgtttgtcccacatttctgcttctcaaccatcttcctctccttgaaccccccagcttttaatctcatgaatgtataccatctacggctctccttactattgtcatctatagactcctagaccatttcctgtcatttcatgaaagttttagctaaattttagcttctactcaccttttagttctcttcagtattacccctgttataattctggatgatttcaatatgcatgtagctaatccttctaatgctttcagttcctgaacctcttcttctctaatgatcatattctctacctacactggccacttattttctcctatggtcataccactgatcttgtcattaccaaaatagcatttgttagtatctgcccatctgccaccaccatctcctttgtttctaactcaccctctcaagtacttcaactctgacagttttcacccctaccaagacttctatcaattcattgattctaccacctttgcactgaccccccacactcattcttacttccctctttatccagttgaggttttgtagtatgttatttaatcccttgcctatcccttgaaccatcatatttccctggtaaaattccaaccatagttaaatataactctgcctgcttcacatttgcacccatgcatttgaatcttcctgaggaaaagcacaaccatgcagactgatatcactataattcaacgtctagtgtacctatgatgctatcacacaattctggttcacttctttggttcatcacttcatttagctcattcatctgctatctaggagattgcttttttatatcttctcctgtcaaaccttcgacacttttttctttgatttcacccataactgatattcttcgctttctgtttcactgaaaaaatagaagcaatcataaaagaattttataagctcttgccaccacttatttatctgtgcctatatactctgttccttgggatgaattctttgtgtttatttctaaggcctaccccccaacttgtgctatgatcccacctgctcttgcctacatcactccagccactttctcccttctttcttatttcttggcccttttctaccatttccttcctatcattttacaaatagtctaatttctgtcatcataaaaatctcttttactttgcatcttttgaatatgcctcatgtcttcatgacagcactccataaaataattgtctaaaccaggccaggtgtggtgtctcatgcccgtaatcctagcacttcgggaggcagacccaggaggatcacttgaagtcaggagtttgagaccagcctgggcaacatggtgaaaccccatctctacaaaaaaaaatacaaaaatttgtgtgaggtgacatgagcctgtagtcctagctactggggcagctgaggcaggagaatcacttgagccagggaggcagaggttgcagtgagctgagatcatgctgttgcacttcagcctgggggacgggagtgaaaccctgtctccaaaaagaaaaagaattatctaaaccagatgtctccagttcctctcctcccactcctatcaggcttttccactgaaactgttgtagcagtgacttccacattgctaaatccaatgatcagttctcagtcagcagcatgtgacagagctgataactccttgctctctgaaagacaagtcacgctttcctagttcttcctgtttcatcaaacactccttttctcttctgttgaattctcttaatctccccatcctctaaacattggtgtacccctgggactattcctctgatctcttttcttttcccttcttttcttttttttttgagacagagtctcactctgtcacccaggctggaatgcaatggtgtgattttggctcactgtaacctccgtcctgcagggttcaagcgattctcctgcctcagccgtctgagtaggtgggattatagatgtgtgccaccacacccagataagttttgtatttttagtagaaacagggttttgccatgttggccaggctggtctcaaacttctggcttcaagtgatccacccaccttgtcctcccaaagtgctgggattacaggtgtgagtgatctcttttcttttacactcattatcgggctcatggtgattctgaaatttatatccctggcctggaactctcccctgaatttcagtctcatctccagctgcctccgtgacatctccacttggatgtctaacagctcagatttgtaaaactccccatctttatactaccaatctacactttctactgttcccatctaagtaaatggtaatgtctttcttctaattgcttaggccaaagatctttaagttattctgtatctcccctttttcccctcatcctgcatgttcaatccatgccatactgttcccttcacttcaaaaaaaattttttttcgagatagtgtcttgctgtgtggcccaggctggaatgtagtggcgtgaacatagctcactgcagcctcgacctcctgcctcagccttccgggtagctggtaatcacaggcacacatcaccatgcacgtcaccacacctaactaacctcagcctcctgagcagctggtactacaggctatgtgcgtcaccacacctggctcattttttaattttttgcagagatgggctcttaccacgatgcctaggctgttttccaacaccagctcaagcaatcctcctgccttgacctcccagagtgcttgggattacaggcatgagccatcgtgcctggccaaaaaattaataatctgataattttctcatttaattgctaccacccatcttcagttactattaccaccatcaaaagtaatagtttatctttttgtttttacttccactcttacttcctgcagtctattcttaacaaaacaaccataatgatctgttaatgtaagttaggtcatagcattcctttgctcaaaatcctccagttgcttcccagttcaatcaaagtaaaagcaaaaatcattacaaagtccaacacaagtcttctgccctttttatctccttgatttatcttccagtactccctcactggtttcagtcacacttttaatttttatcttatgtaacatatacttatatagcacttagcatcattctaaggactttatgaatatgaatattcatttaatcttcataataatattatgaggtacgtatcaatattatttccattttttgaaatgaggtaactgtggcacagagaggttaaagtaacttgtccaagagaggtgaaagtaacttcccagttaggaagtataggagccaggattcaaacccacacagtctggctctaaaattgtgctcactcttccccagtcgtgctgggtagtctcctgcttccatacctttgtgctttctgtgctcttcttgggcgtttcttcccccagtttcccacatgactttgctcactcatcaccttcaaggctttgacaaatcttacctcttctgtgaggtctttttatacaatctcatttaaaattacaaacagcaacggttgatctacagtgtcatcaaggaaggaggatctacctttctgttccattattcttgtgtgtgccttccccatccttgaggtctaggacgacttgtggagtgcagacatcgcatccgtgttctagagagcagaaagagagaaagggatgcctaccagctgaatctcacttaagactccattttcttgttgccagaacttaatatgcccgatggccatactaaattgcatagggacctagaaaatgtagcgtttattaaaggtggcaatgagcccaactaaaagtcagggttctgttactcaggtagaagaagggaagagacaaccagcagtctctaccccaccagggttccatctttatccgtacttgtactttactatctttgaataacattataaacttttatagcttagctaccaaaaataggttgacgactctcatccatgctgccgaaacatatcagctacctctgatattggagatctccatttagatgttccagaggctttgtgagctcaacgtgtttaaaattaaacttatctttcatctttaatggctcaaatgtgctcctcttcctgtaccgtacctccgtgaatggtaccaccagtttatatctccttcacctcgtacattcacccagttacaaattaattttgtaaatatttctcggatctgcctaattctccttccttattgctactgtgtagatcacgccataacccctccccaggattacagtagagttaaatcataacaggtatttaagttcatgtcattttaattcatacagttcaaaagtggggaagaaaataactttaaatagtgctgggtaatcctgcctgtattctactcagtgaacatatattcatctggggactgagtgtgaggtgggaaatataataatgttgctccctctgttatattttttttctttaaagataacttttttttttttaagacaaagtctcgctctgttgtccaggatggagtgcagtggcgcgatctagccaaaccgcaacctccgcctcctgggttcaagcaattctcatgtctcagccctctggcatcttaagagacttcctatgagttcctgcctccaaacttttttttttttttttgaggcagtcttgctctgtcgcccaggctggaatgcagtggtggatctttgctcgctgcaacctctgcctcccgggttcaagtgattctcctgcctcagcctcccaagtagctgggattacaggcacccaccaccacatccggctgatttttgtattttttagtagagacggggttttacagcgttggccaggctggtatagaactcctgacttcaggtgatctgcccacctcggcctcccaaacggttgggattacaggcgtgagccaccgcacctggccagataacattttttagcatactgtcttcatggtgctgttttaagagatttgcatgtattattctcacaatagcaatgtgaggtagaaattgttacatccactttagagataggaaactgaggcactgagtgattaactagcttgcttaaggttgcacagctagctagttagaagagctaatattcgatttaggcaagctaactccagagtccactttcataacactgtgctgccatttccccactattataggaacctggaagcttattttctggagaaggtaaactaaaaggactcagcaatcatagatattaggtgtagttaaggccaagatcaccttactgaaaacagggagattaagtgaaagtctactaactgaaggagagtcccagttagtaggagttctgagactgctggcagcaagtcttctactttcacttaagggattggaggaatattttcaacagaatttctcctgcccaagagaaaagacctacaggtaaaaatagttgagggcccttcaagaaagagctgagtacctcctgtttaatcatcatatagttaagcataccactcaataagcctcttctgtgtacacagagcttgtatttagtcttttaatgcatcacacttacgtcaagaaatagccaagtatcaccagatatttcaggaaaacctttaatgtgaaagatatatactaaaacagccacatacacacacacaagccaataatgagatacctctacacatgtattagaatgacaaaaatctgaaacactgacaataccaaatactggcgaggatgtgggacaacaggaactctcattcattgctggtgggaataagaaatggtacagctactttggaatacagtttggcagttttttaaccaaactaaatataatctcatcataggatccatcagtagtgctccttggtatttacccaaatgagttcaagacatatttctacacaaaaacctccataaagatgttaataacagccttatatttaccaaaatctggaagcaactaaaatgttcctcagaagtgaaagaattttaaaaactgatatatttgtacaatgggatattattcagcactaagtagaaatgaggtgccggagccttggctcacgcctgtaatcccagcactttgggaggccaaggcgggcggatcacctgaggttgggagatcgagaccagcctgaccaacatggggaaaccctgtctctactaaaaatacaaaattacctgggcgtggtgctgcatgcctgtaatcccagctactcaggaggctgaggcaggagaatcgcttgaacccgggagttggaggttgcggtgagctgagatcaagccattgcactccagcctgagcaacaagagcaaaactccgtctcagaaaaaaattagctgggcatgatggcgggcacctgtaatcccagctagttgggaggctgaagcaggagaatcgcttgaaccccggaggcggagactgcagtgagctgagatcatgccattgcactccagcctgggcgacaagagcaaaacctcgtctcaaaaaaaaaaaaaaaaatacccagcatggtggctcacgcctgtactcccagcactttgggaggccgaggtgggcggatcacctgaggtcaggagatcaagaccagcctggccaacatggtgaaaccccgtctctactaaaaatacaaaaattagccaagtgtggtgacacacacctgtaatcccagctacttgggaggctgaggcaggagaatcacttcaacccaggtgatggaggttgcagtgagctgaaatcgtgccactgcactccagcctgggcgacagagcaagactccatctcaaaaaaaaaaaaaaaaaaaagaagaagaaatgaggcatcaagccatgaaaagtcatggaggaatcttaaatgtatactgtcaagtgaaagaaaccatgtgatccagcaattcctcttctgggtttatacccaaaggaaatgaaattggtaccttgtagagatatctatgctcccatgttcattgcagcattattaacgatagccaagttagagaaacaacctaagtgtcagtaagtgagtatataaaaaattgtgatatgtacgtacagtgcaatattgttcagacttaaggagatcctgccattttcaacaacatgcatagacatggagaacattatgctaaatgaaatgagccagacacagaaggaagaatactgcatgatctcacattcatgtggaatctaaaaaagtcaaatacatatgaacagagtagaacagtggttatgtgggggatgggaagatgttcatcaaagggtataaagttgcagttatgtagaatgaataagtctacagagctaatgtacagcatgatgactatatgtaatattgtttactgaaaatttgccaagagagtagatttcaggtgcttttaccacaaggaaggaagaaagggaggaggaagggcaagagggaaggaagggagggaggaaagaaaagataactgtgagagggtagatacgttaatttgcttgactctagtaatcatttctctgtgtatatcaaaacatcatgttgtacaccttaaatgtatataataaaacaaaaaaatctgaaaaggctacatactgtatgattccaagtatgtgacattctggaaaaggcaaaactatgcagaaaataaaaaagatcagtggttgccagagtttagcagagggagcgtgaataggcagagcaccctcacctttaggacagtgaaatgaatctgtatgatactataaagtggacacgtgtcattatatatttgtcaaaacccatagaatgtacagcactaaaagtgaaccctataatgtaaattatggactttgtgtgataatgacatgttaatatagatacattgattgtaacaaatgtaccactctggtgcaggatgttgattgtaggggaagctgtgcatgtgttgggggcaggaggtatatgggaactctgtactttctgttcaactttgttgtgaacctaaaactgctcctaaaattattaaagaaaacacaaggaaagaaacagactcagaggaaaagaggaaacagacaatacaagaccagatgaaaacttaaaaagctacatttaataactttagagaactaaaagaagatactgcattcttgaaacaaaaataaggaattataaaaagggtatattcagaaaaccaaaagtcctagaagtcaaaattagttcaattgttgggttgggagagttacagaagtttcctgggggtggaaaaaaagagaaagcttgaaaatgggagagaaaagataagaaaattagaagatcagtccaggaagtccaacatgcaaataatagaaattctgcaacaagaaaaaagtaaaagggatggtagaaaattattaacaaaataatacaaaaattgatgtaactgaaggaaattagtttcaagattaaaagttttcctcccggtatccagtataatacttgtaagataattgttacccaagacatactgtgaatgatcagaaatccagttatatagataatattctaaaagcttacagagagaaggaacaaacaacacaaaaaaaattcctgcaaagaatcaagaaccacagtagtgaaagtcttcctaggagcaatactgtaaactagatgactataaaacaatgccttcaaaattcctggggggaaatgattttaatatagaattctataactagccaaactgttgcttaagtgtgaagtttgaacaatgacattttcatatatacaaggtctcaaaaatttttattcacccttacttagtgaacaatagagtataccctttaccaaagttagagagtaacaaagaaacaaggaatcaggcacaggaaagaagtggagggaattcccaggacataactaagcagcagatctaagcaccatctacagattggagttgtgaggttttttgtggttttgggagggggtgtttagatgggatctcactctgctgcccaggctggagtgcagtggtgtaatcttggctcactgcaacctccacctcccaggctcaagtgatcctcccacctcagcctcctgagtagcttcccacctcagcctcctgagtagctgggactacaggtgtgcaccaccacacctggctaatttttgtactttttgtagagatggggtttcaccatgttggtcaggctgatctgaaactcctaagctccagcgatttgcccacctcagcttcccaaagtactgggattatagatgtgagccactgcctggctggagttgttcttttcacaaaggcacagtcctcgctccaggtcatgcttgccctctggattgtgttcaggatggaaactcttttcttattcctctgagtaaagggattgtctttctcatttgtcggtctaactcttaatttgtgttaacagtgcttgagtagattagcagtcaggccgggctgttaaaaaagtcagaataaaatagggattgaaccaaggtagtaataaggtgaataaaagaaagaaacaggttaacaaatggtggggtgcagcagagttccagttgagaggagctgatatctgagtaaatgtggacaataaaggagaagtagatgtctggtgtatctcccaggtttccggcttgagccactggattaatgatagtgtcatcaatgaagataggaacacagtaggaggaggttgttcaaaataaaaatgagttcagttttagacttatatgtaggtggacaaggcttagaactgaagcacaggctagaaattcattcattcaatactcttgtctactaataagaaagagataaataagagccagttacttccctgaaaaagctcatagtctaataggggaaacaaatacataagcaaataatttatatctagtatgataaatttaacagtttaaatatgtataaggcatagtgatatcttagaagagagagtgactttgatatgggcaggaggcagggaaatactgggtagaagagggtggttccccagcaaaggcccccaccccccaagcctggaaacccatggccctaattgggaacaggcatttctgttttcatgtccaaatgttgccttttgcctgccatccccgcatcctgtacccatataaaccccaaattccaggtccacaggcaggagagcagacaaacagaggagcagaagaggagcacagtaaaggagagaagagaaggagtgtttgaacgtcaaggagaggtcggttggggacagctggagaggagattggccatgggacagcagaactccaggggaagatcatcttcccactccatcccctttccagctccccatccatctcactgagagccacctccatcacctaatacaattcccacattcaccatccttcaaatccgtctgtgacctgattcttcctggacacaggaaaagaatctgggtacgaagagggcactgggctggttaatacttaagcaatctgtggaaggcagagctaaaagagcactgtagcatgcccactggggcttcaggagttgcaggcatgtattcctagatgctgctgtggggctggagcccaaaagcgctctccccgccccctacacctgccggtctgcgagctccgcctcctgtaaggggtttgagagtgcagcagccgaacagaacagacaagccacagccctgtcgcaggccctgcccttcgtgggggatcaggggactctcccgtttcaactttcccttagttggagggtgagggtcagtaaatgttcatggacaactaagctgaaaaggaatttgactagcagacaaggcaagagagaatattccagcatgtgcaaggatacaaagccatatactacctattgtattcaaagtaccaaaaatagtttactgttattagtagtacataaagtacaaaggagaaaattaaactggagagttagacaagtctcagatcccaaggaatttgtattttttgctgaagcagtgagaagccactgaggttgttgaaaaagagtcaaagtagatactggaatccactgttggttgcttccaaaaagaattttggtcctttctagtgcccagaacataatctctttctctggcaaagaaaacgtagtcttctgtcttccttttcctaaagaaggttacaattattttatgaagattgtaattttgagtaatgataatggaataaagaaggagtgaaatggcctttgtgtgctcctcattttttttcttttttaaggcaaaaaggttttaaaaccctctggagcactgattctgaataccttctttttataacattttctaaatgctccctttactatatgaaatgaaattcccataggtattataccctactgcagtgagctgagtaatgcttcccgaaaaggtagccacatcctagtccctgaaacctgtaattgttaccttatatggcaaaaaagaactttgcagatgtgactgagttaagatgttgagatggagagattatcctggtggactctaaattcagtcacatgtatcatggagggaatatcatagaggagatgcaggcaacatgacctctgaggcagagattggaatgacatgaccacaaatcaaggcatgccagcagctaccagagactgcaagaggcaaggaatggattctttctagagctttcagaagagtggccctgtggacaccttgatttagacatcgtgaaactggttttggatttctggactttagaactgagaaagaataaatttctgttgttttaagccatgaagtttgtgataatttcttacagcagccttaggaaactaatacactacttacataatataatgccataacaatgaaataaagaagacacaaaaagtaaatgttagtgatgtgactttccatttaggaaacaattttttgcaaagttccaaacaaaacaaattatagtcttttctgcatttacatggtaattgtatttctggaaaatttaatatatattcaaaccattaaccaatgtttgtagcatctgccatgtgcttgacacacagagagtatttaataaaagctggatacatgggtgatgaatagatggatgtattaaagctacaaagagagtacataagttccaaaataaacatgcaaggcaaaaattatgtgtagtcaaacgtatctttaaaaattcttgggcaggcccagtggctcacgcctataatcccagcactttgggaggacaaggcaggtggatcacgaggtcaggagttcgtgaccagtagcctgcccaacatggcgaaacccatctctactaaaactacaaaaaattagccgggcgtgatggcgggcgcctgtaatcccagctactcgggagcccgagtcaggagaatcgcttgaacccgagatgcagaggttgcaataagctgagattgccaccactgcattccagcctgggcgacaagagtgaaactccacttccaagggaaaaaaaaaattctttacatagcttatcaaatacagtgttcaatatctacatgacgtactggacactgacacataccatttctcaataaagagctgacagccctctctccccattccctcagcatcgtttgggtatcttatgaaggacatgagttgttttagggatgtaatgaattccattcagcactatgaggtactctcaccgacaatcacagaagaattaaaactgactgaaaggcaatagatatgtttcccatttcaaagctcactgtggacattttcttatggtttggaatggttgtgagctgtccaaactatattttgatgtgtttttcttcttttgatcagggatcatagttcagtaaacccacagttaaactaagtgggctgatcgtatgggtctatctaaagtgaatttgtgtacttgtctcatccttcttattaatgagtggttctaaactggacttggtttttctcccatggggcatttggcaatgtctggaggcatttctgattgtcacagccggggattggggagggcagggtgaggcaaggggctattggcaggtagtgggtaaaggccaggaatgatgctaaacattctgcaatacacaggacagcccccaacaacaaataatgatctgggcccaaaagtagtggcaaggttgagaaaccctggcaacattatgtgtgtgctccccttgtgtagtgattcctttgtagtgtttgccttgacattagattaagtgttcccttaagcagaagctgaattttttgttattgagttgcagtgaaggatgggtgtgaatctctgcagggttaaacatttttacattaacctttcctttttatttttatcaaaagtaatatatggttacatgtatgtgtgcatgtgtgcacacacttatgcagaacttagaacagttccccacccattcttccctagttttatcgcatttcccagagttagcaacatgtaaagagttttgtttttaatttttttggtgattgcctctctaagtctaaataatagcttttggttatctattgatttaagagattatctattgactcttcactgcagaaggttagcaaaagctcagctacactaatccctccccttcttccttctaatattcattagtttatattcgattgtcctttcattgattattttgtaattctaaattaaatacatataaacatttaattttgttccatcaactttagtcagtatctttttatcttctgcctttattatactagcgcttctgttctttcaccttccttattcctatttcctatagtctgtctgctgtacctttacattgtcagattgacaatatttactttctgttttataattatatttgtttgtttttatccataggttgaagccaaaagttgaaaactattaccatttataggatataactgtaaatattgttcactgaagagctaagtagtatactgagatcccagaatcatctctatatatgcaatatcacatcctctgtgccatgagaaagaatgttcctagtattctagcattctgttttctgtgttgagtgttttaaaatcatgccacattcagttggcacactggcatctaaacacatactaagaaagatcagaagtgtcaatgaaattgcatagtgaatattcaaaaaatgaatgacctgcatgggcaaataatacaaaaaaaaaagatcagaggaaaatgatagaaaacacaagaaagacaagaatttcaaaataataagggtacattcccaatggccagctttctgagagttgaactgtatttgaataactcatgtccctcaacccagatccaaagataatattgctgctgctgaaacctgggctctttactatgaccagagtttattaattgtcctatttcattgaggaaaaaatgcaaaacagaacactggaatgactagctggaaatattccactatttcatgggaagcaggtttctaaacgattcctgtggaggccaaactcttgctctcgccaaaatattatagcattaaagtgtgccttgatggtacattaaggaagaaattttccccgaatttacttaagatttatagcctttctgctctcacaaaacgtagcattgatttctttaatatcaaaaaaagtttcctaaaataaactgctaatgattgctttcagtcatttgtttacttgaggtcagtcatgccaagtactgtttgtatcaattcttgtaaaagactcaattaattttgtaattgtcataattactgttattcctgttctgtaggaatatgctattaatgtaactggacatcaccacatcttatttttgtatctctcaaaacatctttcataaaactttgatggtaggaaagagctgaaaaaaaatctcctgttagtagaccaagtagtacttcaattactaaacaccagagaaaattaaaattacaccttaaataaaaccaaccagatatttggtagagaaaatggaactgtacaaaaatatggtttttaaaaataaaattctaccacttgtattatattcattatagactattggaaaccgttccctgccaaaaaaagaaagaaaaagaaaaaagtttgtgaccatttgtaattcattttagtctttttatgtatttttttcacctaaaataatatgggcatttaaatattttaaatatagttttaaatggctacatattattctatcaaaaatacctaccataatttatgtaaccactttctcattgttgagcatttaggttagttttgtttttccagttgaaacaataccccctgagtatctttgcatataatgatttctcttgattttagttttaagacaagctcttaggggtcaaatgttttaaatattttaaaggttcattgttcaaattgcatttcaacagtcaataccagtttacactgttttcagcattttaagaaattgcccaaatgacagagcagaattttaaaagtatttccctagtgttgatttggtttatatgctgagatgctgcagattttttgttgttaaaaagtgagtatgtggagatcaaacatttggctgactgtgtacacattttatttagtaaagcctcaatgttaagcaagaagccattactcatattcatgttgtctcaggaatggaaaagtgcttctaatttttgcaacaaaagaagtctgatggcagtgacagaaaggaatgactagctagatatgctgaccggaaagctagaattaggatttgaccattgtagtcagtctccatttaagagcctaatggttttttcttctcaatttggaagtttgctgcatttagagatattcttataaaactaaaaaaaatagacccagagagcaagtttgaggttactaaaatgtatcccattattgtcagagttgcatttcaaactgtcttcattaaactgttagtttgattacattttctcaaacagtaactgttgtgttttaattttttaaattaaaaataagttttaaatttcaggtaattgaaagaccaattctttttggaatctttcagtattatggttttggttcacagcgaaggtatttgcttgctacatttgctaaatatactatctatacttcattttgttgcataaaaataagacatactccggttagcctttttgatgggtattaccttgatgacttgctcactgacagagaaactgatgtaaaataggtcatttgaaaagcaggtgtttgatatatccccatatgtaacactgaaaagccttcttgctctagatttttggaaggaaagctttcttaagaaagaacggaaaagagagaagaaccaaatagacgcaataaaaaatgataaaggggttatcaccactgatcccacagaaatacaaactaccatcagagaatactacaaacacctctacgcaaataaactagaaaatctagaagaaatggataaattccttgacacatacaccctcccaacactaaaccaggaagaagttgaatctctgaatagaccaataacaggctctgaaattgtggcaataatcaatagcttaccaaccaaaaagaatccaggaccagatggattcgcagccgaattctaccagaggtacaaggaggaactggtaccgttccttctgaaactattccaatcaatagaaaaagagggaatcctccctaactcattgtatgaggccagcatcatcctgataccaaagccaggcagagacacaaccaaaaaagagaattttagaccaatatccttgatgaacatggatgcaaaaatcctcaataaaatactggcaaactgaatccagcagcacatcaaaaagcttatccaccatgatcaagtgggcttcatccctaggatgcaaggctggttcaatatacgcaaatcaataaatttaatccagcatataaacagaaccaaagacaaaaaccacatgtttatctcaatagatgcagaaaaggcctttgacaaagttcagcccattcatgctaaaaacaataaattaggtattgatgggacgtatctccaaattagaagagctatctatgacaaacccacagccaatatcatactgaatgggcaaaaactggaagcattccctttgaaaactggcacaagacagggatgccctctctcaccactcctattcaacatagtgttggaagttctggccagggcaatcaggcaggagaaggaaataaagggcattcaattaggaaaagaggaagtcaaattgtccctgtttgcagatgacatgattgtatatctagaaaaccccattgtctcagcccaaaatctccttaagctgataagcaacttcagcaaagtctcaggatacaaaatcaatgtacaaaaatcacaagcattcttatacaccaataacagacaaacagagagccaaatcatgagtgaactcccattcacaattgcttcaaagagaataaagtacctaggaatccaacttagaagggatgtgaaggacctcttcaaggagaactacaaaccactgcttaatgaaataaaagaagatacaaagaaatggaagaacattccatgctcatgggtaggaagaatcaatatcatgaaaatcgccatactgcccaaggtaatttatagattcaatgccatccccatcaagctaccaatgactttcttcacagagttggaaaaaactaaagttcatatggaaccaaaaaagagcccgcattgccaagtcaatcctaagccaaaagaacaaagctggaggcatcacgctacctgacttcaaactatactacaaggctacagtaaccaaaacagcatggtactggtaccaaaacagagatatagatcaatggaacagaacagagccctcagaaataatgccgcatatctacacctatctgatctttgacaaacctgagaaaaacaagcaatggggaagggattccctatttaataaatggtgctgggaaaactggctagccatatgtagaaagctgaaactggatcccttccttacaccttatacaaaaattaattcaagatggattaaagacttaaacattagatctaaaaccataaaaaccctagaagaaaacttaggcattaccattgaggacataggcatgggcaaggacttcgtgtctaaaacatcaaaagcaatggcaacaaaagccaaaattgacaaatgagatctaattaaactaaagagcttcttcacagcaaaagaaactaccatcagagtgaacaggcaacctacaaaatgggagaaaattttcacaacctactcatctgacaaagggctaatatctagaatctacaatgaactcaaacaaatttacaggaaaaaaacaaccccatcaaaaagtgggcgaaggacatgaacagatacttctcaaaagaagacatttatgcagccaaaaaacacatgaaaaaatgctcaccatcactggccatcagagaaatgcaaatcaaaaccacaatgagataccatctcacaccagttagaatggcagtcattaaaaagtcaggaaacaacaggtgctggagaggatgtggagaaatagaaacacttacactgttggtgggactgtaaactagttcaaccattgtggaagtcagtgtggcgattcctcagggatctagaactagaaataccatttgacccagccatcccattactgggtatatacccaaaggactataaatcatgctgctataaagacacatgcacacatatgtttattgcggcactattcacaatagcaaagacttggaaccaagccaaatgtccaacaatgatagagtggattaagaaaatgtggcacatatacaccatggaatactatgcagccataaaaaatgatgagttcatgtcctttgtagggacatggatgaaattggaaatcatcattctcagcaaactatcccaaggacaaaaaaccaaacaccacatgttcttactcataggtgggaattgaacaatgagaacacatggacgcaggaaggggaacatcacactctgaggactgttgtggggtgggaggaagggagagggatagcattaggagatatacctaatgctaaatgacgagttaatgggtgcagcacaccagcgtggcacatgtatacatatgtatctaaccttcacattgtgcacatgtaccctaaaactttaataataataaaataaaataaaataaaagaacagaccagatgcagtggctcacaccagtaatcccagcactttgtgaggccaaggtaggaggatggcttgagtccaagagtttgagattaacctgggcaacatagtgaaaccctgcctatacaaaaagtaaaaaatgaaaagttagcctgggcctggtgtatttgcatgtgcctgtggtcccagcaactccaggggctgaggcaggaggattgcttgagcccagtagttcaaggctgcagtgagctgtgattgtgccagtgcactctagcttgggttacagagtaagaccctgtctcaaaaaaataagaatgtacatatttaattgtaatatgaaacggatgctgaaaatgaacaccgatatttctttaatctcatgcctcaaagtgacatatcagagatgctctggagacttggttcatataatatggaacaaaattaccttctcaatgccaaattagaaaatgatatgtacataattttcaggtttaaaatatatataccaaggctttgggatgttaaatataaggaatgttgcccatgtataacattatcaattaagcttaagaatattaaagatttgttgattaaaataattactaatttttgtgatagcttttactttagaatatgtgatttgaaaaaaaagaatgttgacatttcacatagttggaaaaaattctagttcttagttttgtaacttaattttatgttctaaaatatgtctcaaatccacccttgtaaaattattagtcttttattattaaagcataaagtttgctactcataaatcaaattatatatctcaaattcaaagctaaattgcccttgtgcattgtttagcagtatgtaaatacattttagaaaagggctgtatcattcatgaagtttccaaattcgttgatcaattctgataataaagttaaaatttttgttcttaattagtagatctcattattttttcagcattccactgatttctttctaatgtagtaatgataggtaaagactgtatctggcttaaaaaatgcttatttttacatacatgtaggtctttgattatgaaagtaccgaggagttcttttgtttatacagtggcagttgaaagaaaacccatgtatatcttgagaagatttattggaactagctttgagaaatgatgagccatatctttaactcaataaaagatatgtattgctgtaccaagccttggtatctgctattctctttagtgtaagcacttttcaaactataggattatacaaatagtagcatcactagttaaaacataaagctatatgatctaaagacatagttttggttattttttgagccatttaattttcatcttttctgtgaccacatttattaaacatgtgacatgaaaatggaatactcttttatgatgacaaaagaaagtatatgcccagccaattatgggataagagtattattttttgtgaacacattatcatcattctagacacctggagaagtgaatatctctgaaagtatcatacatttatactttaactttatttacatatccagttttcagaaaccattgccaatgaaacatttggacaatgtggtatgcaagtactgtatagtaagaagtagggatgttcttgagtaattgttccatttgaattaatccagcatgggtagttgttagacaaccatgaaatgtgctaagctttacctattctaagaggactctattcttacagaccataagcgttcaaaagttttccaagaaaaaaaggttacttctttaaatttagtctgcccattcaaaagctacaataaggcaggtggattaaactgctaggagttgcaatgttagtattgagagcatttaagcaatttaaaatctttcagaatgcctaagatcacaaatttacccctgatcagcctacacagattaacttaaaatacatacagagagatgtcagatagctagagggtcataaattagtgaccaaaattacatcaatctgcatgttgacattgtttaccttatattgattagaaacttttgcttaggaaaaaggggaaataacttttattttaaattatactttaagttctagggtacatgtacacaacgtgcaggtttgttacatatggatacatgtgccatgttggcgtgccgcacccattaactcatcatttagcattaggtatatctcctaatgctatccctccccctcccccaccccacagcagggatgtgtgatattccccttcctgtgcccatgtgttctcattgttcaactcccacctatgagtgagaacatgtggtgtttggttttttgtccttgggatagtttgctgagaatgatggtttccaatttcatccatgtccctacaaaggacatgcactcatcattttttatggctgcatagtattccatggtgtatatgtgccacattttcttaatccagtctatcattgttggacatttaggttggttccaagtctttgctattgtgaatagtgccacagtaaacatacgtgtgcctttgtctttatagcagcatgatttatgttcctttgggtatatacccagtaatgggatggctgggtcaaatggtatttctagttctagatccctgaggaatcaccacactgacttccacaatggttgaactagtttacagtcccaccaacagtgtaaaagtgttcctatttttccacatcctctccagcacctgttgtttcctaactttttaatgattgccattctaactggtgtgagatggtatctcactgtggttttgatttgcatttctctgatggccagtgatgatgagcattttttcatgtgttttttggctgcataaatgtcttcttttgagaagtgtctgttcatatccttcgcccactttttgatgcggttgtttttttcttgtaaatttgtttgagttcattgtagattctggatattagccctttgtcagaagagtaggttgcaaaaattttctcccattttgtaggttgcctgttcactctgatggtagtttcttttgctgtgcagaagctctttagtttaattagatcccatttgtcaattttggcttttgctgccattgcttttggtgttttagacacgaagtccttaacagcccatgcctatgtcctgaatggtattgcctaggttttcttctatggtttttatggttttaggtctaacatttaagtctttaatccatcttgaattaatttttgtataaagcgtaaggaagggatccaagttcacctttctacatatggctagccagttttcccagcaccatttattaaatagggaatcctttccccatttcctgtttttctcaggtttgtcaaagttcagatagttgtagatatgcaacattatttctgagggctctgttgtgttccattggtatatatctctgttttggtaccagtaccgtgctgttttggttactgtagcctcgtagtatagtttgaagtcaggtagcgtgatgcctccagctttgttcttttggcttaggattgatttggcaatgcgggctctttttcagttccatatgaactttaaagtagttttttccaattctgtgaagaaagtcattggtagctcgttggggatggcattgaatctataaattaccttgggcagtatggccattttcacgacgttgattcttcctacccatgcgcatggaatgttcttccatttgtttgtatcttcttttatttcattgagcagtggtttgtagttcttgaagaggtccttcacatcccttctaagttggattcctaggtattttattctctttgaagcaatggtgaatgggaattcactcatgatttggctctctgtttgtctgttattggtatataggaatgcatgtgatttttacacattgattttgtatcctgagactttgctgaagttgcctatcagcttaaggagattttgggccgagatggtggggttttcgagatatacaatcatgtcatctgcaaacagggacaatttgacttcctcttttcctaattgaataccctttatttccttctcctgcctgattgccctggccagaacttccaacactatgttgaataggagtggtgagagagggcatccctgtcttgtgccagttttcaaagggaatgcttccagtttttgcccactcagtatgatattggctgtgggtttgtcatagatagctcttattattttgagatacgtcccatcaatacctaatttattgagagtttttagcatgaatgggctgttgaattttgccaaaggccttttctgcatctattgagataatcatgtggtttttgtctttggctctgtttatatgctggattacatttattgatttgcgtatgttgaaccagccttccatcccagggatgaagccgacttgattatggtggataagctttttgatgtgctgctggattcagtttgccagtattttattgaggatttttgcatcgatgttcatcagggatattggtctaaaattctctttttttggttgtgtctctgccagactttggtatcaggataatgctggcctcatacaatgagttagggaggattccctctttttctattgattggaatagtttcagaaggaatggtaccagctcctccttgtacctctggtaaaattcggctgtgattgcatctggtcctggactttttttggttggtaggctattaattattgcctcaatttcagagcctgttattggtctattcagagattcaacttcttcctggtttagtgttgggagggtgtatgtgtcaaggaatttatccatttcttctagattttctagtttatttgcatagaggtgtttatagtattctctgattgtagtttgtatttctgtgggatcggtggtgatatcccctttatcattttttattgcatctatttgattcttctctcttttcttctgtattagtcttgctagcggtctatcaattttgttgatctgttcaaaaaagcagcttctggattcattgatttttttgcagggttttttgtgtctctatttccttcagttctgctctgatcttagttatttcttgccttctgctagcttttgaatgtgtttgctcttgcttccctagttcttttattgtgatgttagggtgtcaattttagatctttcctgctttctcttgtgggcattttgtcctataaagttccctctacacactgctttgaatgtgtcccagagattctggtatgttgtgtctttgttcttgttgatttgaaagaatgtctttatttctgccttcatttcattatttacccagtagtcattcaggagcaggttgttcagttgccatgtagttgagcggtgttgagttagtttcttaatcctgagttctagtttgattgcactgtggtctgagagacagtttgttatcatttctgctcttttacatttgctgaggagtgctttacttccaactatgtggtcagttttggaataggtgtggtgtggtgctgaaaagaatgtgtattctgttgatttgggttggagagttctgtagatgtctattaggtccacttggtgcagagctgagttcaattcctggagatccttgttaactttctgtctcgtggatctgtctaatgttaacagtggggtgttaaagtctcccattattattgtgtgggagtctaagtctctttgtaggtctctaaggacttgctttatgaatctgggtgctcctgtattgggtgcatatatatttaggatagttagctcttcttgttgaattgatccctttaccattatgtaatggccttctttgtctctttttatctttgttggtttaaagtctattttatcagagactaggattgcaacccctgcctttttttgttttccgtttgcttggtagatcttcctccatccctttattttgagcctatgtgtgtctctgcacatgagatgggtctgctgaatacagcacactgatgggtcttgactctttatccaatttgccagtctgtgtcttttaattggagtatttagcccatatacatttaaggttagtattgttatgtgtgaatttgatcctgtcgttatgatgttagctggttattttgctcgttagttgatgcagtttcttcctagccttgatggtcttcacaatttggcatgtttttgcagtgactggtactggttgttcctttccatgtttagtgcttccttcaggagctcttgtagggcgggtctggtgatgacaaaatctctcagcatttgcttgtctgtaaaggattttatttctccttcacttatgaagcttagtttggctggatattaaattctgggttgaaaattcttttctttaagaatgttgaatattggcccccaatgtcttctggcttgtgaagtttctgccaagagatcagctgttagtctgatgggcttcccattgtgggtaacccgactttctctctggctgcccttaacattttttccttcatttcaactttggtgaatctgacaattatatgttttggagttgctcttctcgtggagtatgttagtggcgttctctgtatttcctgaatgtgaatgttggcctgccttgctaggctggggaagttctcctggataatatgctgcagagtgttttccaacttagttccattctccctatcactttcaggtacaccaatcagacgtagatttggtcttttcacatagtcccatatttcttggaggctttgttcatttctttttattcttttttctctaaacttctcttctcgcttcatttcattcatttgatctttcatcactgatagcctttcttccagttgattgaatcggctactgaggcttgtgcattcatcacgtagttctcgtgccgtggttttcagctccatcaggtcctttagggacttctctgcattggttattctagttagccattcgtctaattttttttcaaggtttttaacttctttgccatgggttcgaacttcctcctttagcttggagtagtttgatcttctgaagccttcttctctcaactcgtcaaagtcattctccatccagctttgttccattgatggtgaggagctgctttcctttggaggaacagaggtgctctgatttttagagtttccagtttttctgctctgttttttccccatctttgttgttttatctacctttggtctttgatgatggtgacgtacaggtggggttttggtgtggatgtcctttctgtttgttagttttccttctaacagttaggaccctcagctgcaggtctgttggagtttactggaagtccactccagaccctttttgtctgggtatcagcagcagaggctgcagaacagcggatattggtgaacagcaaatgttgctgcctgatcgttcctctggaagttttgtctcagaggagtacccggccgtgtgaggtgtcagtctgcccctacaggggggtgcctcccagttaggctcctcgggggtcagggacccacttgaggaggcattctgtcccttctcagatctccagctgcgtgctgggagaaccactactctcatcaaagctgtcagacagagacatttaagtctggacaggtttctctgccttttgtttggctatgccctgcccctagaggtggagtctacagaggcacgcagggctccttgagctgtggtgggctccacccagttcgagcttccagtccactttctttacctattgaagcctcggcaatggcagcgcccatcccccagcctcgctgcagccttgcagtttgatctcagactgctgtgctagcaatgagcgaggctccgtgggcataggaccctccgagccaggtgcgggatataatctcctggtgtaccatttgctaagaccattggaaaagcgcagtattagggtgggagtgacccgattttccaggtgccggctgtcatccctttctttgactaggaaagggaattccctgaccccttgcacttcccaggtgaggtgatgcctcaccctgcttcggctcatgcttggttcactgcacccactgtcctgcacccactgtccaacactccccagtgagatgaacccggtacctcagttggaaatgcagaaatcacccatcttctgtgtccggaaataacttttaatatgtacagcttgagagaaagaatctttcagaaatgagatatattagagaaacataataaaagaatccttggtgattttcttaaaaagtaaaaaccgtcactactgagaaaaagacatgttttacaaagacatctgaaaatcataggtattgtggcttatgttttgggatggaaatgaaagatttgatgaaaattaccagagatttttacataaaacagctgattaagcccaaccatcctttttagtgttgcctttatttgaggatgttagggagaattttctcattttgtgtttagtcctgattggcctggatcataagaattatactgtatttagtttgtagtaggacctgctcttctctttaggacctgacacataaatagttttgtgtaaaagtgaacattgtaatttctcttaacagctgtaacatcttatgaagatcttggactctttgcatttggattacctggaaaggtaattttttttcctcctcattgtgtccaaaacccaaagtggcatttttccttttgtttcaagttaaaagagacaagtatatacaagaggaagacattagaggaataaaaggaaactaaagtgagaaaagagagaatgataggagcaggcaaagaaagagaagtctttgtgtccttcctaaaaatgcatcaatacatttaattcaatgcttgaatcttttaatatttttcatcctaataaagtagcacaatgacttgaatgactttaaaagagtaacgatgacctgttttaagttgtattaattttgattatgtactcatatgagtaaaccctcataaagacaagaaaagaaaagcaacatcgaattcaaattgtagcatggctatttacaaaaccagtaatcagaagatcatatcacttaagaattgaacattgctacaagattatctagctatcctctcatttataggtgaggaaattaaggaccagagaaattaagggacctatttgtcaactattatataaagccagtaccacatcctagaactctagatctactgcttttcttactcagaataagagaaataacagcagtatttatggggcacccacttgcaataggggtactacactagtttaataggtagagaaaaataattgtcttccaccagtaatcaggagttgaacgttactgttagtgctatagtatatatattttttaatttctgaagaactactatacttctaaaattcatattcattttggctccaaacaggaattcttttgtttgtaaatctgttgtttgtgtttttatgttttcgattgacaaatacaaattgtatatatttattatggacaacatgtcattttgaaatatgtaaacattgtagaatggctaaattgacctaattaatatttgcattacttcacatacttaccattttttgttttatttttattctaaaaggatactctatctgtaactggctaaactaacttctgaaagtgagtctggaggaaatatatatagctatacaatggaaagaaaacctgtatttacattccagttaactttggtggagttttttgtttttgttttttcagacagagtttcgctcttgttgcccaggctggagtgaaatggcatgatctcagctcaccacaacctccgcctccctggttcaagcgattctcctgcctcagcctcctaagtagctaggattacaggcatgtgtcaccaggcctggctaattttgtatttttagtagagacagatttctctatgttggtcaggctggtctgggcctcccgacctcaggtgatccacctgcctcggcctcccaaagtgctgggattacagcgttagccaccgcgcccggccctaactttgtttttaaagtacaaaaaggaatgcttaaatcatatactatatagcatcatggcttggaccttagtaacctgaaacttaaacaaaacagaatatgttacttgagggtaaaaggttttgttaatcttccttagtagcaatgtttctgttctagaggattaggatgtttggtgtagccagggatcagtttcctccatctagtttaaacaaagaagaaaatattttttgtatgagaaaattccacaattaatataacataacctataaacataactctaagtatcaacactgacatcactgtcatttcatgttcatatttcctgcgttgcttgtatagcagcaaagtttaaagagtagggactgctgagagtcttcttttcctaaacctcttagagtagttgtgttgtcattttaatacatgcaccaaaaaagttcatagtaggcaggaacactagacaaagcatactctgaatgaggagttgttgtttggttgcttgtttaaattttctccacacttccacagttgggttgaaacttaaccatttccttctatccagatgttatatagttataatatgggataatattatgataaagaaattttttgaaatgttttgaacttgttaaagatttatttcaatgtctataaattggtatttattcaccagacaaatatttattgatcaaatactttgtaccatgtactgtgctaggcattaaaaatataagtaggtaggcaggtgggtagatagatagatattctagctttcaagatattaaatgcttaaattcagccaaagaatgaaagaataatcatcaataagttaatattactgttttttgcaatatattaattgaaaataaaaccaaatttcatgtatacctactactgacagtaggtatcatttgtactgaagatagtatacacaagttcaaaatagtcttttcacaaataacttcgacattttggaactaagttttacataggctgaaatgcagaattttttctggagagcgttcaagtggcaatcaccacatctccaaagacactttgccagattttcatatcattagccctcctctgcaaacctcaaggctcctaggtcctaataacttagattgttttcagtgtaggcaaatgctgtgccactgatagaattcctaacaaagatgggcatgaaagattatctgttcccaattcatgtagaactgaatgattctagacagctagtcagctccaggcatacgttggggttccgatccattaagacttgagtgattgaaaggcccacatggaagcacagtgttttactgtttcctctaagcatatctgattaccttgagttccccaggaatctcatcaaagatgataagctaacaagcctacagactgaatttagtcctcaggcacattttatatggctcaaatattttttatttttaactgattaccaactaagcatcattaaagtatgaaaaaatttcatttctgactttctttgaaaaatcagatctggctacattggatccacattctcacatattatcaactggccagagctgagtagcacctgccccattgaagggggaggaattctccaatatcctacagttcttgccaactcccattgtcttatattcagcttaattcacattattgagtttggaacattttgcctatattttcagggtttgagagtaattgggctctagactttattaatctctgggactgggatgctcaaagtctgggatgctgatatagtcagaaaacttatatcatttccttttaggcaatatagcattggcatagcacacccagccggtctttttctacttatttaagcagtgtgataaaaccagcaagaagggaatgagacaccactcccacacttttaatttttatacttgataatcatcgattactagcttttaacacttttaacaatttaaaagtgactgccaagaaaaatttcaaaaacttctttatagtaactttggaactattaaagaaatactttttaatgtgatgattattaattttatgtatttcaaatgactggcagatttctttttagtttctcctcacaacttctgcatctgcttttttagtaatagttactggattttaataaaatactgatccttttatattgtttccccttctatcttctgaatatttctgttcttttacagttggtggtggcaggcaccataataattcagaatattggaggtaagcaattgcaagtgcactgtttatacataaatgtgatggcaataatgtcctttgaattgttatcttactacagatctagctgggaacttctgtagacatagctatcttcagaagcctgtgtgttggcctctttactctttttttttttggatcctttttagcagcacttgtgacagtagcttctaaattcagtttgagctaaaccctgattgcagtcgtgttattaggtctgcaacacacctctaaaacattggctttctgtgattctgaaggtaggatacagtctggaaaagctctcctggtgattttaaaatattttccctctacttttgttctaatcaccctattggcagatactactttagagggattagtgttccgtgggctgtgaacaagcaagtatggacaacagtgtcctcttgtaaccaagaatttaaaatgaccaagtggtttaaaacataaataaatctgagataaataagcattctcacatttatcctgtatcttgttcctattaataaccaattctagaaatgatctcaatattgagaactatgtagaaataaaactactgttaattatagacagttactgagtaaatgtattaaacatttaaatccaaaatatgggtatcatgtgtgtatatgttgtaaagaagttgcgtagtgctgaacaatatcttcgttttcttttatcattgactggagtgctaaataaatgctcttaaaggaaaatacacagaaaaggttgacatgtactttggatcttatacaggattgtatagtcagaggacattttaatcttattttttacatgtaacagtttaattcaaagatgacagttttaataaacttcagctctcataatcaagaggtctgagctatatcactttaagtattgttcaatcaaattccatcgttaataggtttttttggttaaggaaaaattgacattccaccagtgaattgtgctgccattgttttagaatcctgttttaattctttgaattttcatgaaaaaatatgaataaaaagaatgctttcttgcatgccataccaaataattttctcctaacacacactacttcacacttcacagtagaaagtcaagaaaaccagtctcttcatttatgaatttattatagtcattgattttaagatctattttggaataatttatttagcaactaagtattgcttaactgtgcactgataatgtttctgaatatgatgtatatttttatatttttaatccctctttatcctctctgtatagattctaagaactatcacatattgtttaggttagattgaaccattgtttaacagtttatgtagactgttcagttcagcaatttagatccaaatttgtgaccctggcacaaggcccactgttgtattctttgtccctttcaccttgattccttccttgttctctaatcttgtttataactgttattggagatggctatactgtagcacttggctgctactagatttaacttctctgtatgtatgctcctgtaccccactatattgttaagttcctttagctcaaaagtatgcctcatttctctttgtactcccagcacctattacacctgggaattgataaacttgttgagcagaatagagctgaaatgatttgtataatctctttctaagtactttaaatattctagatatatttatcaagaagagaaaagggaaatgctagactggcatctagcttcaggtatttgaaagactgaacatgaaatataaaaaagacactagactaattcaagtattgttccagagggcagaactggtgctaatgtatagaaatctacagagaagctgttttgggttttcttattcggagtacccttgtaactaagctgtgtgataatgaggatggcctacatccctttgaaaatgctccttagccctgaaaacattcaaacagagctggttggtcagttgccagaattctagaaaggattcttgcatttggaggtggataaatcatgagttttcccaactcttaattttgttggtttgcttgcttgcttattttagaacttttttttaaaaaggtgatttagagtggtcacagcagtttttaatgtcccttaaatttagaaaagctagtaatgcttatttagtttttagaatgatatcctcatgattttcttcacattggttaaaagtgtattaagtgcccagtcagtaataaccaaatacatattttcagagttttttctgtcttttttcgtagccagatgtacataaaccatttctttattataatagaattggaagcttgctcttgtgagcagaacactagattggaagtcagataccttgaattctgtctactccagtctctgccattgggtagccatgtgtcttgtggaaatccctcactctcactgtcttggcttcagttccctctttgttaaattgttggacggtagagtgggaagcagggagtttaaggtcccttcttaccccaaaatttgaattcaaatttggcacattgggaggcatattaattattttaacgtattaacgtattttattacaggaaagttcaatgcgagggttatacttggttcaaaagatgatttggccctttcttaggtatctttaacaaatcaataactattgccctaaaagcattcatggatgctattttttgtcactaagcaaaagggaacttcagttcttaggactaccctttagaacctcctcttaggttaaagtctaggaaccctagccttaaaaagtagtttcttgattgatatatacagaatctgtggaacttctagtccatgtatgcttgcaaacaacatacttatttgggaggatatttaatatactgtgtcattatattaaataagtatatatatatatatacagttttattataataaataagttaatcgtacaatgaccaatgttacttcattaaaatggattttgattattttctttattaattggacatatattggatatttaaaagattatattaagtgtaaatcagattgaatttttacacatcttaagtgcctgtctgcaaataatgtagttcagataacttttttttaaaagaatgtttgttagtataaattatctgacttttgcagtggttgtttacattaaaactgaaaaataatgtaatagattctatttaggtcaagcactctactagatactttaattataacaactcttcaatatagatattatcttcattttatagagaagagatcagtgtgcagtggagataagtagcttgctcacatttatcccataatgaagcttggattcaaaccttgctcagttggcctttattctttctgctatgatatagcaaatgtttgaaaaatgtgaaaagattaaatgttgaagattttctaacttcttggggacaggaactatgtgtttttatttgttttcctaactttacctagtttctgagaagagctcaataagtagtatttgttgaatgaattggacagtttttaaagttctgcttaaaagcctaagattttgcctcaaagagacaattgaatatactatgtaagtgataaaaaaagaaacttgaaagaccatagaatgacttctagtttagaattatataaaaatttaaaagttcaaaatactggggagagttagatctcatttatgtaaaatgggttaacaatatattgaaataggctgggtgtggaggcccacgcctgtaagcctagcactttgggaggccaaagtgggaggattgcctgagctcaggagtttgagaccagcctgggcaacatggtgaaacccagtctctactaaaaatacaaaaaattagccaggcctggggttgtgtgcctgtaagtcccagctactcaggtggctgaggcaggaaaatcgtttaaacccggtagacggaggttgcagtaagccaagatctcgccactgaactccaacctgggcaactgtctcaaaaataataataataataataataatatatatatatatacacacacacacacacacatatatgtaaaatatctattattttcaggttaagaaaatcatatcttaatgtttcttaactctcttattctttgtaacatttaaatacttctcagttttcatgagatacaattcctgtggtgaatccatgaaaaaaattgaaatggaaggcctttaaaagcaaaatgaccatggattgcccttgatcaatatttgtttcatgtgtctttcgccaaagacccagtttatttcccacatttccatattccataaatcaaattaatgtgctcatttatttacatccctagtacttagcacatagtatacatttagtaaataacatttattataggaagaaagaaaggactaagaggggagagggggaaaagctagtgacctggcttagtactccttcaagagcaaaaagagagttgattgaccaggaagagaaagcccagtatatgtaagtgagcatatagtttttaggaaagcgtctactgttagaacttcacagaaaatcgtttttctcccccaagattaatcaggcaccaagtattagtcacaaggctctagtgtggtctgacaaattgattgaaaaaatctactgtctgtaaatctctaaattttataatggaaaaaaatgcaacacactagatttaacactcttattctaaggttatagaaatccttggctttggaaatttgggaaccatatagtaaattactacttaaaagcaattcctgatatcttcccaatactaatgaataacaggctcaacattggctagagccagaggtaaccctctgcagcccatttcctcaggtgctggagtagcatttgttgagagccactgctactgggacccaaagtcagaaaagatgtgtctggaagttttaacatttaatgctgttataggggacaattctggcttagagagtttgaatttggcagcctaactaaagataaaagattaataactgtagtagaaagtaagtataaggtagttttcacatagttcctgtaacagtgttgtattatgtgattcttttcttaaaaactaaggtaagtagttggtttcacattcatttgaactcctgaagtaaaccattcagtaggctagaattatcactagaaatcaaacactacatcccaatcatcttcttagtcaagccagaaaaagtcttattaactcttacaagcacatgataacagtgaagtcaattgatgttatttctggtttcacaacttgcccaattcaaaatgtggaaagatgagtagctcctagggggatgttatattcttattttgctcttataaatatgaaggattactatgaatagcatatgctttccttaattcttcaaagccccagttctttaaaggagattaaaaatttaatcattactacgttttgtgaaaggaaaaccataaacattagtagtcttactgaaacctcctgaaattgctagaatgacccagatgtttcagtctggcacagaatccacacaccttactcttgcagcctttattaacacctcagtttggtaatctatggactcgggtaaccccatttctaaatctcagaaaggtataaataagatcattttcaattgagaattataaaaatctcaaattctcagtatttgaaaaattcacaatattagatgctagaaactacttggatttgctttcttcctgtatattcattcatgcattttatttatttactttttggtaggctagtaaagtactaagagtgtttcagatatactagtttgtattgtctcttgggaaactaggattgggcgcgcagatacatcgccatctgctggtcagtttatctgtggtgaaactgcagctttcttgagacttgtctagaaattctagaaagcactgccttagaataggagaggtacacgaaatttggagagtctttttcacaagcacttcatttgacaacatttactggtagtgtatcttttttaaggttttgaaaatatttttcatagtaatttctattgaaaattataaaattttcagaacagtagatattttggtcattttttattcaaatttaagatcctgaaaatgataagacaaagatatacatttttttctagggtcatgggggagcattttcccccatatattttgattttcatttatgcatgtgttctgtactatttgagtgcatatagaacttcagtggcatttagatattttgtgggaccaccagattaatgagacacattgaatagaataaaccagttagtatccatgactaaaaacatgtttgaaataaaattgaatctctctgagacagaaaggcaaacttattttttccccgtagcacatccgtttgtttagggctgagtaatcctttaagaattgctgaacttcccccaagtgctgaaaacctaattctgttttaaaaatagctgtaagtaattctgtcctcatacatatattttacatgtttaacaaaaaagattcttatcttcataaactgtaatgatgtcttaggcccaaactccaattagggttggtttgttttttttaagtttgtatgcttaataacgacaacttgggaagcattttcagagtgctgcgaaaaataactcataagaatacagtatttggaagcacagagactgatttttattttttggatttcagtggagtgttaatatttcaaatacgtgagaataggaaacttcctcttcagaactacaatcacagccgtaaatacagtagagtcatagcagtagatgcaatagaatctcatcatgaaactccatgaattttgaactaatcacatcaccaaaggagctccaatactgaaaaatgaaatacattgaaaatatatctcaagatgaaatgaaaattctaagtgttactaaagcttctgactaatgttctctgtgatattcatttcctttgaagtcaactgttaatctcagcattcaaaagtagtttgtttaaatactgatttaaaaaagaaaaataattctgaagagtggtacttctggtagactttccttatttgtctttgttttgttggtttactttttcactttgctcctgcactttctcatggcatactagttaatagaacgagtttctcaacccaggcgggctgtttgcaccatcactagcttgggcaagttacttctttgtgcttccttatattctgtgaaataagtaatatgtacctcacaggtttgtgtaaagattaagtgaggaaataacttgtgtagaatactaccaagcatacagtaggcatctaaaaaacaaagatgttagctgttttcatggatctctgcccagagtcccttccctgtttctgtgtttctaacatctctcctctcaacctcccgggcccaattcatttatttcactttataattagatcagcagatattaacaccttgcaacttgctattacctaatcagattttaccccattttagtcactttttaatattactgttgcttctccatgttgtttttaaagagtgctttcaacttctgtgttttcagttgacagatgttttattttttcccagagaagtttctattaaatgagttatattagtttaaaattaagtagaaaagaatacctatttagttaatgtgctaaaactaagtgatttataatggctgaatacctgacatcaaggtatatcttctggcactgattttggctttggtggtttggggccacttaactatatgcatggctcttgtggatgacccagttgcagctattaatttagagtagaacatggtgtgtcttgttttaggaatctatactaggtgtccatgtcacccaaaatcatttgcaaatttttgcttatgattggtctgtaagataagtgcttaaacactttcttatgccatttataaaagacataagacaaaaactgtggcagacagctatttgatctagtaaaccttttagttaaaaacaaaggcaatatgagcattcctatcaatagtatatctttaaaacttttccagttcattttattgagctgattgttcttttgtatgaatttaattaagatatatttcctaacttaatgtgtatttggtaatctttttgtttcttttctgtattatatataatataatgtgttaaagtgctagttcttacatgaaagtttacttgtgattaagaaaaaaataattttcatagtgaatagaatggtggtggcctttgttttactggcttaatccgtgtgggttttcccctatagtaagttctgtggttgtatactcttaaaatatatactaacattctctagaaaagaagcaatgttttgcatgttttattatatttgtatcttgtatgtgaggtcttctttgagagagaaacacgtttggtgagttcatatttcttaaaatatacatgattcttcagactggaatctaatgaaatagtactcccatttgaaaaccaaagagttgagggtacaacaaaggataaaagtgatcagatgattagccaggggctaatagaaattctggaaagaatgacagatattatattagaaagaaataggatctcatattcactgaagctttctacagctaaaggtccaaaagaaataatagaaaattactgaaagagatgaatgtctgaaactttagaaatgcatgtggtgttggattaatccaagcaagaaagaaagatgggcagataataaattacattttataggaagtctgctttccttgttttcaaagtattttgtcttttttcttttctgtctctctcacaagatatatttaagtaagtctaggccggtttcagaaaattcagttcacaatttttatctttgcaccatatgtgtagagttctttggaatcggtaaaatattataaaaactccaaatccttgaatggagaaggttagtctaaaccttccttctgttctgtgccaaattgatagcatttttccttacgagaatatgaacaatacagaacacattttcacatacaatcagttgtaataccccataactaaaagattttgcagaaatgtctcagtggattttagtcaacccactgagacatagctgtacttctgctagggaaaaagaaatcgttgtaaactgaaaaaatatgtatatgtatattttcatcacagagaagtgattatttaactgttctaaattttactttgacataaatacatgttattttactaaaaaaaattgagagtgtatgtttttgtgtctatagtattatctatctccatacaaatttacacgcaaagtagcatgtatcctttttttcctcaagttaaatggtcacatagcattgtaatcatgaagttcagctcctttcaaatgatgttgattgagaaatatacattcttcttaaactatttgagccttttaatcaatttttccccagatttttgccattgaaacttgactttcatttttgttcttagcttttgtaagttttgtaaggagaaagtgaaatgtttcctgatatataaataagtaataaaattaatgtgcacacaaagtatactctttattcttttttttttttttttttgaggtggaattttgctcttgcacccaggctggagtgcagtggtgcagtctcggctcactgcaacctccgccttccagtttcaagcgattctcctgcctcagcctcccaggttagctggtattgcaggcaactgccaccacgcctggctaatttttgtattttcagtagagacaggatttcaccatgttggccaggctggtctcgaactcctgacctcgtcaaccgcccgccttggcctcccaaacactctttgttcttcatgggcgtttcctttttggccccaacacatacacacaaacataatctctgggaggaaagagaatcttactctgttaaattgaagttctgactacaaatcttctgagtttctatatatttaagcttaaactcaagtatttacatatgaatgagttctgtattctgtaaccatattaaaacttttcctagtatttttatagaatttgtttttatagctacatcagaattaggatcgttattaaagtgctataaaaggtagttatttatcggactctgttagattaaatgtgagaaataatgctagcttcaggttatgattacataatatagatgaaccctgttaataaaatggaataaaagttggaagttttgtctttttaatatatttaatggtttatattgaactttctctaatctttttagagactaattttaaatgtaattcattatgtattcttttttatcctataattatatgtgttcataatgcaggggtgggtagtagagagaggaaaagaaagggacagagggaatgagacttctctgttgtggggaggcatctttctctagtaagaaggaacagataatccagttactagccatacctattaaacttctgtgtctatgtctgttgttgctaaactaacctctaatgccttagacggagtgataacatataagagagtttttgtaaaactttgtacaaaatttcatttaaaagtagcctgtaatcaagactgtttctcttacctagtttgctttggacttgaaatgtaaacaaaagatacttaatgaacttaacaattgttattcttctctacagttacttttctgtgtgtgtgtgtgtgtgtgtgtgtgtgtgtgtatgtatctttggtatagtgtgttatatgttaatcttccacatgttgtcatagctctaatggacatctcttttcctagatggattattgtttaaatggttaagaatcatagaattctaataggaacactttttattcttttgcagctatgtcatcttatcttttaattattaaaacagagcttcctgctgctattgcagaatttttgactggagactatagtaggtaagaaaaagtattttacattgtgtccgttcatgtattaattcgataaatatgtattaagctgtaaatggcaatacttgtagtggcaggtaaaataaatgtagtccttgccctcaagacagttacaaattaggcagaagtgaagcagtaatagaatagaaactactcagccaatgtttgattacccatatgaaagcgctgttctgtgaaccatatgaagcaccagatataatccttgcattccttgggggtgtgagataggctaagacaggtctgagattgagatgctcttaaggaggaataaagggtaaatttctggggatatgcaagacacaggttggggatgggagaaggttgaatatactgacagtacgggtcttaaacaaaggaggggagtgaatgatattgctgtcatttctcagcaaatcatagtgataaaaaatgtggcagttacaactatacctgtttgaaattcctattatataccatggcaaaaaaataaattatttgcaaggacttaattgtttcatttcctgtttttgaacaatattataaacaatactaaactacattgtatctcttttatctttctttaaaaaatgcatcttacatttttgactcacctctttatagggaaaaaacaaaattaattgtacttttcactgtgtagaacaagaacattctagaaaaaggaacttgaaaagacagaataaatcattttaattgccatcaagttatttcacatagttaagtttcaaaccacagtacaaaacctgtcagacttttagatttgaatactgggttgttctgcttcaataattgaacttgttctggaatgcaaggaaaggtttcaaaaattagtttttagcttttacatttcagcttccattaaagaattctacttagacaactgcaaatacatatttgtaagaaaagtgtggtgtactttagatctgaatagaaaccatcaagaaaatgtagttaaaaaaagacaagtagaagtcctaaatgatttctcttcatcagaagatattgttcctttgtatgatactttacagttaatgaggtttccacatgcattatcacatctgatactcaaaactaccttattttatctacagctttatctagttacattttgattttatgcttaggttgataaacaattcctataagaaatagctatgtgaaattcatttttgtatctgctgtaaaaaacattgagggcaccttctattactcaaattctatgtgagaaatttatattttagggttaagaactcaaggcaatatgaggtagaataaagagggctagactaagagtaaggagatatgtgttctatccatttaatattcaataatctcaggaacttaatttaacttcttttgactatataaagtacttggagccttaggtttttttatgtgatataatgggggtaccaatattgccttctcaataaagttgctgggatgatcaagtaagatatatatacacatgctaatagcatgtgtataaacaagcatgtgtgtacacaaacttacagcacagtgtggagaattaaggaattctaataattactatattaaacgtggtgtttccctttttgccctgactgccaggaagctcagagtcaaatgtgacacatttgaattaatataactgtgttaattccaacagttgtcacaagtgttttcttttttcttgatcctgaatttggtggctcctatttatattcttttattgtcatatgtcggtggaaagaggagggattagaaatatatgtaatattttagaaataattaaagtagtatgtggcagaactggtattgaaatttaggtcttctttctctaaaagtgatatttttaccgtagcttcattttaaataattggcaaatgatttacattgttgcattgatttttttgttttttaaataaaaattaaaatgaacttccatctcattcatattaatagaaaattgattaaaatgttatttttacatgttagaaatacatttttaaaatcatatacttcaaaatactgtggtcagtttgcatcatctctgttatgttttaaaattgtacatctttttaacaaccttatcttgttttaaatgtaatatatattcatttatttttggctaattatattaacttacttgaatgcagataaatcattagtcttgaaagcttgatgctagaaaataagtaagaaacaaaatatgataattgactttactatccataaaggacagtttttttctagatagacttacagtaggcagtatttcttctatgagagaaacatgatattgataagcttttattttagggtttgatatacaataaattttaattaagatctttcaggtatgctaattttctgggttatctgcgagcttggtgtacctttgaaatataaatctttataaagatatcagaatgaaactgtgttcataatattctaatagaagtcagaagctataatacttatactgaactttcatgatatatctatatatttcatagaataacttacatttttaaaatctgtggctgttaaagttggaagctctctgttaacatttaatgatcttgtcggggaatatgattgacacaattaagttgtcttgcattttagttacataattgatatgggatgtgagtaagatcctaattcagaacatatgatactcttgttccattcctttcgagaatgaaattaaagcgacttataaataaatctggttttcattaaaatatggaaaaaaacatctgcatgccaaagcatttgcaatacagctaaggatttatactctatatttcatacttggaacatttttatcatacaggattaaatccacagatcaaacaagttctctaggaagtataaaggtttttactctaattcttttggcttaaagagaatgtatatttagatcacagtaggaaaacaggagttctgttagatcgttctttattccccccttaggaaaaaattaaagttagtacattcttctgaaatgcttatttacaaaataaatgtatttaatatgtactttttgagatttctttttactagtttgtttttctcaggcagcagttttattttgtaagtttaataatttctgttctttagaaaatatccattgagaaacacaattcatttgtctgtgacacacatgtgaaatctaaactaattttactgtgctttactgtgttgcctttattgttaatgaatggtaaagaaaagcactgtatttaaaattggctttattaagatgaattattaaggataagaaatgattaacgataaccagtagccaagacaaggatagagaaattacattttacagtataattatttttatattaagaatttaaagttcaatcctatgaaaaggagaatgcaaagcatgatcttgaaataaatgaggtagtatctgaaagtatttccattgctactgtcaccttccttttgctgattttacagacatataaaatgaagttgttgagccagatgatctctaaggtctcttccagctctaacattccataactgtgattctgagttactgctgggaggaggtaaagttatcttcagtcccacagttcagtgctttggtcagttatatgacttttatggacataaatgaattgtgatctgaaatagtataaagtaactggtgtacagaatttcaaaaagtgttcctttattcctgtgcaagagaaaagagtcctggtcctggggattaaatgctcccttttgtacaactttagcttcgtgacatttttttttcttttaaagagtgaaattggcttataataattttttgttttattttattacggtaagaacacttgacatgaaatctgcactctcaacagattttcaagtgtataatgcggtattgttatctacgagagacagcaaaactaacagatggaatctcctttggtactcctttgggcatttttcctcctggcactgcaactgtctgggtctaacattgggtcccagaaggaaacacatttcagacatagagccctgggccttttgccagcttcagaaatttggttgccaggtgttcctcaatgaaagatcttttgaagtttctgttttgattcttactcaagagtgactagaagataaacacgttgagtatcatttttgtattattgatatgtgtactcttttagtacttcctgcataccaggaattgaggggcatgtgcaaatggagagagcaaagcttcaggtccactaaagctgtaaatacttatgcataggttatagtttctggcatatgtatttcctaatgatacaaattagggtggagaagggaaaagtgtcatcatggtgctgtttctgcagctgctccttctcttgttctgttaaagaggaagttgtcagcacccaacagtaacaattaagttcatgttagaagccactggttgaaatccatgtagaagacctttgcctaatttaacatggcagtgggagactggtatctggcagagaatgaaagaggatgcgttattgcaaagtgggaattttgagattatctaccaaacaatttgaaaaagtccctattggtctttgatgccccaagctcccatttttgcataagttttactttgttactattgtgcgtgtgtatgtatgtgtatacacttaagtgtaaatatctgacagctacgataaagaaaattgagaaaaaaaagcaaagaaaaatcatgcataacatctctaacctagtcactgtccttttaattcttttgaatttttcgcaaaagctttcaaaactatagttaataattatatttatatcatcatcattttccattttattcattgtgttttttcttaaagccacgtaacattccattgagtatgctgttctaaatattttcaaatgttgggtatatagagttttcctccagcttctcaatattataataatatattcaacagcttcacatacatagaattttctctattttattttcttagattgccactacatttttattgctcttgctacatataatcattgtttttccaagagatagtactaattggcacgatcactagcaatgtatgaagtccaattgtgccacatccttgaatatttttgtttactaattttgctagattaattgaaacagtctcattatttctttaattagcaccagtgattggattttcttcatgtgtatttactagttgtatttctttcatgaattgtttctcctttgcatacaaatctattgaggtcttgggaattaactttaacttttaaaaatgtctacatatgtatctcacatattgctcatattgctatcacataaaaatatctactttttggtattttaagtatatccttctggctttatatgtgcatccagttttgtttttttcaatgaacaaatacaaaatcacgttaacctacctttttctcattctgtattctaatgcctttatatgaaaattttaatattttacaattggtgattaatgccctttcctgaaatttggaaaaatgtatatagaaaactataaagaagaaaaatgacctattattttaccacccagagataatggctatcaatatattttagttcctttccatttttaatgcatccatgtttttcctcaaaattatcatgctatatacacacaaatatatgatgtttactgaatattcagtatattgttatttcaaaattatcatggtcttggaggtttgttttcaatttttattattttaaatgttttcagtaaacatctttttataaaagtctttgttcttcaggaacagaaaaccaaacaccgcatgttctcactcgtaagtgagagttgagcaatgagagcacatgaacacagggaggggaacatcacagactggggcctgttggtgggtgggggcaaggggagggggagcattaggacaaatacctaatgcatgcagggcttaaaacctagatgacgggttgataggtgcagcataccaccatggcacatgtatacctacgtaacaagcctgcacattctgcacatgttctacggaacttaaataaaataaaaatttacaaaaagtgtatgttcttattatttttaatagtcttttataagtgttttcaagtatataattatttgaaaattctttatatctattgccaaattgctttccagaaaggtaatttatataatttgcattttcaccagctttttacacacctcatcactcctcactaatgttgactattatcttatttttaaatatttattaattcagtagttggaaatggcatctctttgtttttattcatttctaaatgtcaattcattaataagaaaaataggatcccacaagaacattttaatgaaaggaagtaggcttttcctaatagctggttgtaatggttataactctgtgtgtgtgtgtgtgtgtgtgtgtgtgtgtgtgtgtgtgtgtgtgtgtgtcagaacaaacactggagtcccatgcctaaagtagaactttttttataatagatattggtatcttgatggacaaacactactaataatcatatgtgttggcattgtgttccctcttgcacttcttcccaaaataggtaagtctttatagagcacattatttgtttagaaaaaggaaagaagggagggagggaaagagagacaaatattaaggggctttaaaatttcacagtaccacatttttggcagaaggatggtggttgtgtataattttaaacttggccttattttaggttgttcagccttcagccctgcctagttaacctattacttggtttgcagtagtattttgtctgccccactaaaataaaatctttacagcggaacattaaagagcagcctttccttacagtgtaccattagtggtaagccagttccaattctgctgtacagagctacataaatgatctgtgacagatagttggaatgttgttattctgagccctaagccccagataccaaccactataatagaaaacatgcctaagatgtatagctttagttgtacgttaaaatcgctttccttataaattgctttttattttactgttattttacaggctttcttggctacacaagtagtttatcatttttctttatgatgttctttgctcttgtggtaagtttaaaatataatacattgcttatctcctcactaaaattggactcattgtgttagtcttttttacttttaactgttttgtgttgggaagggtatctcattttatttcactgtgttattaaaagcacttttgttccattaaattatttccttcattgtatctattttgaagaggcttagctagaacagcatttcaaattcagcatttcttgtggttaactagagaggagagcgtgccaattctgttaaaatcctagatggagtgtaattctttgtgtaggtgtgtaaatttattcctgtaccatactgtatgaagaatcagtctggttctaatctgtaaaatctgtttgagactagtcatcttaattttgaaactttattccattaataaaaaaacagagcttctggtactacattgaggagatctagtaagaactgggttgactgaattctattttgtctggtttattcagcatagataaattctcataaaaacactactacaaatatttttcttcacatgtgggatatattccttattttttaattagctcatttttattatataaaaatatcagatggtaaatttaacttattttgatattataaaataatataaagataagaatttaaatttatttccttctaattcttctaaaacatcttaacattctaaagatagtacctttgtgtgaaattttttaagtcttttttctttgtatagcagtttattccataatcagtatctaaatgtcaaaccttaagtagaaataaacatttttaactttccaagaatatacatgtccaaatgagcttttcataagcttggttcaactctttcttgtttttgaaaatgcatgaaagaaacagccatatgtaagagcagaacagcacatcagtagttaagccatattaaagatccagatttcaaagctgtcaaaacaacctagggtgcatttaacttaggctaagctatcttctgagacacagggataaaataactttaaattatttaaacaaagtggaagtgactctgattttagtatatataagcatttattctctattgaatgctcttaaaactaaaaacatttaacagtgtttacatttaatcatttgttgaatttaacaacattaaaatcattcctcttcttctctccccagttgtctgacttatatcttacagataagtgaattgaacatacactttgtaggctccatattgaaaaagaaaaaaactaaatatttccattatcatttgattgttgagaagtgtggttagaagtggcctacatatgcaaatgaatgtatggatattaaagagaatcagtatagataacatattgaatttttctctcacagataattggcaatgcaatcattgcatagataggagtaatttagttttcatagccaatagcttaaagcaggttaaatgtattgatatgatatgtctactgtagttttgtttctgtcatgacagatactctttaattcaatgcagatttctaatgtagcagccatatggaaataatacccatattctacatttattgtaatgccttataaaccatctgctcagatttttacctgtgagcacagtttaatctacagtggggcaatgaagaatactctgtatgcttttttaagtactctttttaattggcatgtttattttattatttatttatttatttattttgagacagagttttgctctgtcacccagggtggagtgcagtggcacgatctcagttcactgtgacttacatctcctgggttcaagcaattctcctgactcagcctcccaagtagctgggatttcaggtgcatgctaatttttttttttttttttttgtatttttagtagagatggtgtttcaccatgttagccaggcaagtcttgaactcctgacctcaagtgatccacccacctcggcctcccaaagtgctgggattacaggcgtgagccaccgtgcccagccaccatatttattttagattctctgaatgttatcttttaaaatacatagtggttaggaaaaggaaacgtatatatattaacccagaattttggaaggataccagtttttcatttattattcttgtcaatatgtgtttgtaaatatgtatagcatttatatcatattttttaaaaatcagttcaggaactattattttcttatattctttgaataatataaactaaaacctatattttatctgttctcccagatctgtattttcattaaaaaaatttaacctaaatttttgccccctctaaaatattttgcaattttaaaaataaattatatctgtctcagaatgataccatcaagatggatttacctttttttggtaaatttactttttttttggtgtattttagagcacaagcggattaccattcgttctaaaagttctatcttaagtacagattagtattctaagcaacgttttaatacgttggtaatccagttagacaacttttttttttaagagacagaatctcactctctccagtcacccagactggagtgcagtggcatgatcatagctcactgcagactcaaactgccgggcttaggtgattcttctgcctcagcttcctgaatcactagaactacagctgcataccaccacgcctggataatttttttttttttttttttgagatggagtctcgctctgtcacccaggctggagtgcagtggcgccatctcggctcactgcaagctccgcctcccaggttcacagcattctcttgcctcagcctcacgagtagctggaaccataggcacccgccaccacgcctggctaattttttgtatttttagtagagacagggtttgaccgtgttagccaggatggtctcgatctccagacctcatgatccgcccgcctgggcctcccaaagtgctgggattacaggtgtgagccaccgcgcctggccagataaatttttttttaaatgttggtagagacagagtcccattatgttgcccaggctagccttgaactcctatgttcaagtgatcctcccaccttggcctcccaaagtgctgagattataggcgtgagccactgcactggcctgaaatagagaattatttaaatggtttttagtcagaagctttgcttctactgaacactatgttaggcattttaggatgtggaaatttaacctggacactagtcttaaggatctgtcaatctagtgggggagataaatttcttttcaaacatggagaacagtgtgtgcaatatataaataagtattgatatatttgcttcagaataagagtctcaagagttgagaggagagaaggctcactgagagctagagtaaagaaggattttagaggaaatacaacttgagttgagccacaaaagaagcaaagggcttagagcagagagaaggaagggaggccttttgtgcaagtgaacaaatatttttaatacttagtctcctttttccctttgtcattccaaccccaagacttaccttcttaccaacctaagcaaggacttcctgttaatctttcctctctgttgttgggtctcgtttcactcccgttctgtacttctgctttgtgggacatcatctctatccaccccataccaccatgcaggcttggagttgggatggatctttgcagagaaattagctgtagtaactgaactgtctattaatataaaatcaggctacttcttatttttttcaaattaataaaaattaatgataatattgcactttggagcattgctttgaaatattttgatttgaaagcttaagaaataacaactgataaatgaggcagctcacatacagagtttatctaggtacctggtgcacagcaagtcctcagtaaatgattttttctgccaacactaccactgttagttaggggaaaatataagaaactgaatttgggcctgtgcagtggctcacgcctgtaatcccacactttgggagcctgggacaggcggattacttgagcctaggagtttgagaccagcctgggcaacatggcaaaatctattctctacaaaaaacacaaaaattagctgggtgtgatggccacacacctgtagtcccaggcactcgggaggctgaggtggaaggatggtttgagcctgggaggtggaggttgcagtgagctgagattgtgttactgcactccaggctgggtgacagagtgagaccctgtcttaaaaaaaacaagaaaagaaactgaatttggagcagtttcaccctcacctcatcctcatcgtttttttttgttgttgttgtttttctttgaaaacctataaagataatgatggtgagattattgcttttgattttgttatttccttttggtaagttgaccgtttcattttatgtcatattgaaaacttacctagaaatgtcaaagcagcttgtctagtttatccttctacagtaatttttttcttggtgaggtttttaattaagagtgattctttagttcactcattaacttaatcctaaaagtatatgttttccttatatttgttttatcactgtgtaaaattttgattaaattagtcaaaatccaaaactaggtaaataccaagtaggaatagaaattgtgtttacatattggtctcctacaaagagcaaatacttcctttattctttcttgtccttttgtgcactgggattcaccctggagcaaacatttacagagtaattatgtgccctgaaacaacagcaacaatggtaatattgacagagccacagctataggtctgataacaggatggccacaattaagagtaaaaacatgaaacattttcattgattaattctgggaaacagcatccctctggatttcttttaatgttttttttgtttgtttgtttgtttttaccagctggagttccctagctatatgctcctattccagccagctttctccacattcaccaaaaataattcagatctgtaaaagtaaggaggggcagcacttaatgtgtacatcagaaatccctgagctccttctgagtataaagtctgtacttatttcttcctgtggcctttccataaactgctgttaaatgtttctctattcactaatacctactctacaaataaccatattcctgtgtgacagtcactgaaaacatcatgttcctgttttgagttgcacttaaaaaaaaatgccttgatgctgttggaattttgaaagttgacacaggagtacccttagtctttaatgggggagatctctacttaacaccctgcagtctccaaccgcctccctaccacaggtgaccatgttaaatgttgaccccattctaaccgggaaaagtcacagaagcagagactcttctattagcatcttatttaattgaaatgatactgacctatttcaattcagtttcttattaattttataagaaatgatctgagtgctgattctgtttacttttttaggtaataattaaaaaatggtccatcccttgtcctctgacattaaattatgtagagaaaggcttccaggtaatagcttatattttcttttcagtttcttcctttttattttaactaaaaagaaaagaaagactaatgattcttttctgattgatgaaaaagtaatggctatattgcattttagaactttgttttgaaatactttcatttgaaagcctagtaataataaattcatcatttttattgatatattctgaaatttaatggctgttggtttctctttttcccctcaatgctcttaaacagatttcaaatgttacagatgattgtaagccaaagctctttcatttctccaaagaggtgtgtaagttattaacagatacttttagttgatttttcacatttcaagttttaagaggtttgtgtaacagggtctcttaggtctttgtacctgtgactaattaattttcatgaaagtgctaagtataggattgcctaccagaagactactattatttaacacagggtggcctattatgaaacagccacctttttttttttttttttttttttcctggtatgcctttgaatggagcctgttttaaatgggcctctgcctgaaagaacagatttaccgaatgtctggtctggccaataaggtcctctgtgtataccaacttcctgttgccctctgcacttgtaaagctaaatagccaattatatcaaaaactcttcccctgtgagtagaaccttggtctgtagctaaacagcctcatcattggactagggattgagcactgccaatatatcttctggccgacattccaaagttgaaattcatgatgccaggagtagagactaggagaccaagtccctttgccttccctaaaagccataggatactggaaatgcctgtaagagcccctgagcatcagcagaggagacaagaactgtgacatggatggtctctgctttaccactctagaagagctcaaagtcttccctgttgctgcaggcttatttgtctatactttctgactctgctgaaatgctattttgtatagttcccagatgctagaatcccccctgctcatgtaaaactctattagtgtagaatgttagcttggttactccaccatgcagaattttcctttttatctctagtttttaaatgagaaatatctctctggtcccaaaagggagattaccacatcttttacatggtaaagacctccaggtgccgtaaagatctaggtaggataattgacaagccaggaaactgagcaatatatgaaatggagaatttgtgaattaaactctcattttcctagtccagcctcaggaaacactacagcttcctctctcctaacccccttcagatattttaagactctaggcattatgtcccaagataggtcttcatttctggaatttcttttgtttaagagcctaaagttagttaagtggaaatttttttagagcagaaaggagaaaatagatcaccatcgtctatttggtaaagatggtattttcacttaaatggtaactttttttgctttactctgactcttaagtattctaataataaaaacaaaacaaaaccttatatttgtatattacattggatctcttaagagtttgtaggtctagaataaatgatattcattcccattgaaagagatcctaatcaaagatgctggcaatattaaaatgtgattaatattttcagtattcccttggattgagttcatgaaagcaggttcaagagcattaactattagtgctgcttagagtaataagatacatttaaattgtgcgtacatttagaagacagagaattaaaaaagaacatttctaaaatgttatttttatctcatttaaatattatttatcttatgtaatttttaaaatcttatccagataatgtagaagtagtgattgtagtaaaagcagcatggtatgggcagccaaataaaaaatattctggctagtacaggcaagcccactatcaaataaaatatttgctggatcacaagtgtttttctcttttaaaaaattcttattttataaagagaagactcattaaagatgaaataaatgtaatcaaattgattttttaaagaactgagtttgttgtcaaatgaaataatggtttcagtagagtggcatttaataattttgtctctttaaaatttttttcagagtgcttatgccttaccaaccatggctttttcatttctctgccatacctcaatattgcccatatactgtgaacttcaaaggtactgtagaatcctggaatattttaaatatattgtgtatctttttacctctaaggctttcggattgaatgacatcctcttttattaatcctttcctctcatcagtggatcctaagtgttagtttaaaacaaaacaaacaagagttagttctgtccaagttaagaatgtttcctagaagtgtaatctttgaggctggcctgtaatcccagcactttgggaggccgaggcaggcgggtcacctgaggtcaggagttcaagaccagcctggccaacatggtgaaaccccgtctctactaaaaatacaaaaaaaatagccggacgtggtggcgggcacctgtaatcccagctacttgtgaggctgaggcaggagaatcgcttgaacccaggaggtggaggttacagtgagccgagatcacactactgtattccagcctgggcgacagagcaagactctgtctcaaaaaaaaaaaaaggaagaagtgtaatctttgtgtactaatttcgaatgaggacttctagtgtatagttattgatggagttgttcttgaatgaggaattctctcgaccagcttaggacatacttgtttctttacatataattcagatcacttattctacctttgtcatttttgtcttttagtccttcaaagaaaagaatgcagaatgttaccaatacagcaattgctttaagttttctcatttattttatatctgcactctttgggtacctcactttttatggtaagtacattttaaaattatagatgacaaaataatagttacatagatggcctcacgccaatctatagactttacctatgccttttattactaagttaatttgctcagatcaccaaattacaatgcagtactgtggtggctcttgaggcctaaacaattggattatctttcttttagaaaggtagttcaggtttaagattaatgacttcttatgaaaattttcttaaacacttaagtaaaacttcaggcttagggacatgattctttctataagaaaaaatgtgcaattttaatgattctgtttttcttaaattttgaattcaatatattagtctaattcagaagtgtgggggttgggtgagtcagtcatcttaattgcaaaagaacaagttgagaaaggaaagggttttacacagaactatatctgtatacttagatgtcagacatctctgccttcagatctaattatcacaggattcagcagatgtgcattctatgatgcaccatgaccttcctccttaattatttttacaggttcttttaaatttatgcaacaaaaataaaattgtgttttatttcttttgcaaaaactgtctgctttgtatgttgactttttttcctcttctgataagaacctcaagaaaaagtaaagttctgtgtacaccatcaggaaaagcattatttccaatgtgagcatggtgccctgctagagacgctacaaagaaagttaaaacagattgtcaagcttttctgatcatcattaataaaacaaaattacttaaatatataaactttatttttggatgttgggtttgttagtttttatacagacttgaactcaataagacttttctgtgtcaataagatactgtaacagggtctcttgggatccaaaaatattttgtatagtggaatagctatatatttcttttattaaaattgctacctggcacaaacactattatatttagggatcttcagcaataagaaaaagtccaaaaaaactgacctccttcttctccctatggataaatagaactatctggaagaaacctcagatggcttgccaatatccaggctggctgagaaattgttagatgaatcaccattaggtgcttagaaactgtattaaattgtagctgtattagattgaaagggatgtggaggaaggatggaagctaatacatttattgagctaacatttaagacagtgtcaggtattttatatatactccctaacttaatccttataacaattctgcaagctcagtgtaggttcatttaggttgagtaattagaccagatacttgaagccagttaatagtggaattgggatttgaatctagttttgtctctctccaaagccaatgcctttattactgtgttgtctactcagaaattgtgctatagaagccagatttcctttattccaagtttttgttaaggtgatcttttagaaaaatatgactcacttaagctctaggcatccatctatgtatgtatctatgtataatctatctatctaacattgctgcttgaacacaaaggctaaaggttttcatcatgtagatggcatgtttcctagacagggatttgtctaatatcaagtaaaaccattatgttgtctctgatttaatctcttctccactaatgcaaattcttcagagtatgcaaattttatataatagagaaatacacatctaagaaaatcacatggtaggtaggtatatgattgattaataggtaggtgggtaggcagatagatgggtggatgaatagatgatagattagatagatagatagatacatacatacatacatacatacatacatacatacatacataaatagaataaatgatacaaaagtagtaagttcttctccaaagacagaagaggcagatattgatttgctcttggattgtgaatcataaccaagaaaaacctttgatcatatctttctaccaggataacaggagctttgtgtcataggaagaaattgctggttgaacctgagatcttataagggctagcctcaacttaaggcttccaattcattttacagatgaacaactaaagcccagagaggtgaagtgacctgtcacagaattaaaggcaggtttcctgaatactaatccagtgttatttctgctactttgtgataatctttgtaaacttaataccctgtttgacaatgtgtattaaacaggacagcctcctgacttcaatggcatatataacttgcagagatcaccattaggccctttctgagatttgtagagatttgtctgaatccagggaagcatgcaccactctatccctcacatatgttatggctcagttaagaacacagagtgactggctcagaagaagtgttttcatcctgggaaagtagaaagtggacatgtgacatctattttgaatttgtaataaatctagttcttcaagattcaggagctgctttggatccttttatccagagctcctaaagtttaatttctaaatttgtcagattaaagggacttataggtatgtacctagattaatgatacttgctctgattacagctgtgaaaggaagagaaaagggttcctctggtgagccaggccagtgcccaaatgttgcataataaccaggccatttaaaaagtctatgaggttgttaagcaagaagtgttaatagctcattttatgattcagaaaatggaaataaaatagtttgccatatttctccaaagactcacaagtatctcacagatttggaaatagaatccagatttcctggctcttcttagtctcctacttagtccaaatcccacattgtgtaaagtatgtttttgatactttggacaattcatttctctcctgtttccattatcactagtctagttcagattctctttacctctcagtgattgtaacagtagctgttatgcctgtttggggtctctttttcttccaatccgtactcctgctttagttcagatcataatacactgttctttgtaagtcattattgcatttctgtggcctaccaggttgaggccacatctcatgcagaactgtattactaggtctgaaatgcatttccagccctatcacccacacactgtttcatccactgtagtacttactagaccacttattttctcagatgcacattccctttgctttgtttgtgctgctccttgcttctagagaatctcttcccccacatctttgaacatcagcacacattcattgactcatgtaatgttctcagtaaccctatagtttagtatatggccatccccattttaaagatgtaggaactgagagactcagtgtaagttgctagttactggtggggtttgaacatgttctatgtcatcacagtttagaatctccatagctcttgtttagaactctctggccacttacatgtgtatatcacactttctatcatagctatgtgtattcatctcatctcttcttaaagttccctgagaacagaggtatgtttccttttgtttttggtttccctcaaagtatcctttctgaaacactctcaaattaaaaggcaccattctattttaagtacaaactgatattttcccacaaaacactgatatccagtgtttctgagcaccctcagtcttctttccccttgtctgggttgaggttagggagacattgtgagaatgcaagaacactggagcaaagcttggtcggcatgtataaatcctattgctgaccaccacacactggcctactaagtaagacatttccctaacacttctctttttttcataaaacatgaatccacagatgaaacgtaacatgcaccaagctctgagattctagaaaacgttgtggtattgaggaaaagatgctgtctctagcaccaaaaagaagtaggtgtatggcactgcccctttgtgttatgtgatcttaggcaaatcatttaacacttttggacctacctgcgtattaatattgttatcatggggactaaattcaacaacacgtgtgaaagcactttataaacaaacagcacaaatgttcaaacccttagattatggaaaagttccaaagagataatttagtatacatattcattgtcataatttgagaggttctgcttattctggtttttattaaaggaaaaagggtgttaggtttcaagaagatatttaattaatgtctctgtgtttcataggctaggggaaaggccaggatttggtaatgggaatctaaaatctgttatcatccattagtgcaaaggaaaacaattttgttactattgataccttagtactttataatgtgatccttattattttatttacagacaaagtggagtcagaattactaaaaggttatagtaaatacttatcacatgatgttgttgtcatgactgtgaagttatgcatactatttgctgtgcttttgacagtccctctaatccacttccctgtaagtactcttaaagggttttgttgcctagtatagacgcttcctaatagggaaacactaattctttgcagaatagaatgtttgaatcacatctagtcttgtatatcttattcacttgtcaagtaattgatcaaagacttcatacttgcatatggccccgtaaaagcataaaaataacagtgagccactaagctaatttgtgctttttgagatttagtttagatttacgttctcccacagcattgtttccaatttagaaactatagttcttctaaagttttgggtttttcccccctttaattctgtattctgttttcaaaaaaatgtgcatgaagaggaaaaagtcaagtcaggaaaaataagctccttctgggtttattgtaaatttattttcacataagcattctagttcaatcttggtgaaaatattttatttgctctagaattgtaatttaaggggcaaaacagattttcattgcatctggttgctatacttgagaatcttaagaatttctgagaaaaagggaacaaaggctttgggtataaatgcatctgcatggatgtcttgaatctctaatgctgagttttgtaagagctggggcttcaagcctcctccctgtgtgggctgcagtgccaagattacagcagggactggataaattttttggcatgtgaccgcctgctgtgctcttagcaatgggaagtgtagtgaactattttttcatatttacaggctgtgaaacatataaaataaaatagtaagtggtatttctttcccatggcatgatttctttttctattataaattgtctgtttttttaatctgttgcatttaatgaaaatcattctttgagacttttttcatatttttattgttggtaattttaaaaattatgcaacctaaaaaaattgcatgtgaaaactttttctagcattaaagctaagtatttttatgaagcttacacagaaagggttagtatataaacagtttatgtgtataaatactttataataatagtttatgctgtatttttgaaatctaaatgatgtaggaggcaaaaatatcatggttgttgtatatgtttctctcagcaaatatctggactttgacatttcctcttcgctatatgtttatttttctgtaatacaggccagaaaagctgtaacaatgatgtttttctccaattttccattctcatggattcgccattttttgatcactctagcactcaatattatcatcgttttacttgcaatatatgttcctgacattagaaatgtatttggtgtagttggtaagttttctgtttcaaaaagttcacataataaaattgataaaattgctacccagcctcacatctgaatccagcaatatcctctcttttttttccctccactttaaaggtgccagtacatcaacatgtttgatttttatattcccaggactattttatcttaaacttagcagagaggattttctgtcatggaaaaagcttggggtaggttgtttttgtttctttctttcaagacttctattttaagaaatagtttgtcagtttatattattttacctgcatcaagaaagtcaatatattttaaaatatagaatacattattgcagagagtagagatttaacaaataatccaattgtatttttttatcttttttcttttatctttcttatcttttatcttttttcttatttccacaggcattcgttttgctcatctttggaattttggttgggaattttagtttagcactcatcatttttgattggattaataaataaaagaaatattttcctacttcttacaagaataatatacccctagttgcaagaatgaattattccggaagacaccctggatgaaaaataacattttaataaaaattattaacagaaaagcagaacaaaatggcagtgggtatggggaagtaagagtgtagcagttttaatcaaaaaaagaaacaaactcgaaatgctcttaaatatattgggttgatcttttgttttttaaattaatatttttatggtagttttatgtttgcagaaatactgaacagaaagtacagagttcacatataccgttttaccccaacatacagtttcccctattattaactcttgcgttcatgtggtacatttgttacatttgatgagccaatattaactattattattaactaaagttcatagtttaccttaggtttcattcttggcagccactagcaaccactgatttttttttaacttttattttaggttcaagggtacatgtgaaagcttgttacataggtaaactcgtgtcacgggaatttgttatacagattatttcatctcccaggtattaaacccagtactcattagttacgttttctgctcctctccctcctcccaccctctacccaccagccccagttgtttttttctttgtgttcataagttcttactatttagctctcacgtagaaatgaagacatgcaatatttggttttcttttcctgtgtgtgtttgctaaggataaaagcctccacctccatccatgttcctgcaaaagacatgatcttattttttatggctgcatagtattccatgatatatatataccatattttctttatccagtctgtcattgatgggtatatagggtgattccatgtcttggctatagtgaatagtgctacagtgaacagtgctacagtgaacatttgcgtgcatgtgtctttatggtggaataatttatgttccttggggtatatattcagtaatgggattgctgggatgaatggtagttttgcttttagctctttgaggaatcaccatagtgcttccacgattgttgaactaatttacactcccaccaaaagtgtataaatattcccttttgtccacaacctcaccagtatgttattttttgactttttattaatagccattctgactgatgggagatgataatctccttgtggttttgatttgcatttctctaatgatcagtgctactgagctttcttatgtgcttgttggcagcatgtatgtatgtcttcttttgagaagtgtctgttcatgtcctttgcccactttttaatggggtggtttttctcttgtaaatttgttcaagttcctcatagatgccggatattagacctttgttggatgtatagtttgcacatattttctcctgttctgtaggctgtttggttttttttgctgtgcagaagctcttaagtttaattagatctcatttgtcagttaatttttgcttttgttgcaattgcttggtgcctttgtcatgaaatctttgcccattcctatgtctgggatggtattgcctaggttgtcttccagggtttttaaagttttgggttttacatttaagtctttaatccatcttgagttgatttttatatatggtataaggaaagggtacagcttcaatcttctgcatatggctagccagtcattccagcatcatttattgaatagtgagtcttttccccattgcttgtttctttcagctttgttgaagatcagatggtcataggtgtgtggccttatttctgggttctctatactgttccattggtctatgtgcctgtttttataccactgtcatgcagttttagttcctgtagtcctgtagtatagtttgaagtgggttcatgtgatgcctccagctttgttctttttgcttaggattgccctggctattcaggcccttttttggttccatatgaattttaaaatagttttatctagttctgtgaagaatgtcattggtagttttataggaatagcattgaatctgtaaattgctttagccaatatggccattttaatgataacgattcttcctatccatgagcatggaatgttttttcatttgtttgtgtcttctctgatttatttaagcagtgttttataattctcattgtagaaatctttcacctccctggttagctgtattcctaggtattttattctttttgtggcaattgtgaatgggattgtctgatttggctctcagtttggttattggtggtgtataggaatgctagtaatttttgtacattgattttatatcctgaaactttgctgaagttatcagctcaaggagcttttgggtggagaccattctagatatagaatcatgtcatctgcaaacagagatagtttgacttcctctcttcctatttggatgtcctttctttctttctcttgcctgactgctctggctaggatttccaatactatgttgaataggagtggtgagagagggtatcctcgtcttaacgccagttttcaagggaaatgcttccaggttttatctattcagtataatgttggccatgagtttgtcatggatgcctcttattattttgaggtatgttcctacaatacctagtttgttgagagtttttaacatgaagcagtgttgaattttttttttttttaagtctttttctttttttttttttttttttttttattatactctaagttttagggtacatgtgcacattgtgcaggttagttacatatgtatacatgtgccatgctggtgcgctgcacccactaacgtgtcatctagcattaggtatatctcccaatgctatccctcccccctcccccgaccccaccacagtccccagagtgtgatattccccttcctgtgtccatgtgatctcattgttcaattcccacctatgagtgagaatatgcggtgtttggttttttgttcttgcgatagtttactgagaatgatggtttccaatttcatccatgtccctacaaaggacatgaactcatcattttttatggctgcatagtattccatggtgtatatgtgccacattttcttaatccagtctatcattgttggacatttgggttggttccaagtctttgctattgtgaatagtgccgcaataaacatacgtgtgcatgtgtctttatagcagcatgatttatagtcctttgggtatatacccagtaatgggatggctgggtcaaatggtatttctagttctagatccctgaggaatcgccacactgacttccacaatggttgaactagtttacagtcccaccaacagtgtaaaagtgttcctatttctccacatcctctccagcacctgttgtttcctgactttttaatgattgccattctaactggtgtgagatgatatctcatagtggttttgatttgcatttctctgatggccagtgatgatgagcatttcttcatgtgttttttggctgcataaatgtcttcttttgagaagtatctgttcatgtccttcgcccactttttgatggggttgtttgtttttttcttgtaaatttgtttgagttcattgtagattctggatattagccctttgtcagatgagtaggttgcaaaaattttctcccattttataggttgcctgttcactctgatggtagtttcttttgctgtgcagaagctctttagtttaattagatcccatttgtcaattttggcttttgttgccattgcttttggtgttttggacatgaagtccttgcccacgcctatgtcctgaatggtaatgcctaggttttcttctagggtttttatggttttaggtctaatgtttaaatctttaatccatcttgaattgatttttgtataaggtgtaaggaagggatccagtttcagctttctacatatggctagccagttttcccagcaccatttattaaatagggaatcctttccccattgcttgtttttctcaggtttgtcaaagatcagatagttgtagatatgcggcattatttctgagggctctgttctgttccattgatctatatctctgttttggtaccagtaccatgctgttttggttactgtagccttgtagtatagtttgaagtcaggtagtgtgatgcctccagctttgttcttttggcttaggattgacttggcaatgcgggctcttttttggttccatatgaactttaaagtagttttttccaattctgtgaagaaagtcattggtagcttgatggggatggcattgaatctgtaaattaccttgggcagtatggccattttcacgatattgattcttcctacccaagagcatggaatgttcttccatttgtttgtgtcctcttttatttccttgagcagtggtttgtagttctccttgaagaggtccttcacatcccttgtaagttggattcctaggtattttattctctttgaagcaattgtgaatgggagttcactcatgatttggctctctgtttgtctgttgttggtgtataagaatgcttgtgatttttgtacattgattttgtatcctgagactttgctgaagttgcttatcagcttaaggaggttttgggctgagacgatggggttttctagataaacaatcatgtcgtctgcaaacagggacaatttgacttcctcttttcctaattgaataccctttatttccttctcctgcctgactgccctggccagaacttccaacactatgttgaataggagcggtgagagagggcatccctgtcttgtgccagttttcaaagggaatgcttccagtttttgcccattcagtatgatattggctgtgggtttgtcatagatagctcttattattctgaaatacgtcccatcaatacctaatttattgagagtttttagcatgaagggttgttgaattttgtcaaaggctttttctgcatctattgagataatcatgtggtttttgtctttggctctgtttatatgctggattacatttatttatttgcgtatattgaaccagccttgcatcccagggatgaagcccacttgatcatggtggataagctttttgatgtgctgctggattcggtttgccagtattttattgaggatttttgcatcaatgttcatcaaggatattggtctaaaattctcttttttggttgtgtctctgcccggctttggtatcagaatgatgctggcctcataaaatgagttagggaggattccctctttttctattgattggaatagtttcagaaggaatggtaccagttcctccttgtacctctggtaggattcagctgtgaatccatctggtcctggactctttttggttggtaaactattgattattgccacaatttcagagcttgttattggtctattcagagattcaacttcttcctggtttagtcttgggagagtgtatgtgtcgaggaatgtatccatttcttctagattttctagtttatttgcgtagaggtgtttgtagtattctctcatggtagtttgtatttctgtgggatcggtggtgatatcccctttatcattttttattgtgtctatttgattcttctctctttttttctttattagtcttgctagcggtctatcaattttgttgatactttcaaaaaaccagctcctggattcattgattttttgaagggttttttgtgtctctatttccttcagttctgctctgattttagttatttcttgccttctgctagcttttgaatgtgtttgctcttgcttttctagttcttttaattgtgatgttagggtgtcaattttggatctttcctgctttctcttgtaggcgtttagtgctataaatttccctctacacactgctttgaatgcgtcccagagattctggtatgtggtgtctttgttctcgttggtttcaaagaacatctttatttctgccttcatttcgttatgtacccagtagtcattcaggagcaggttgttcagtttccatgtagttgagcggctttgagtgagattcttaatcctgagttctagtttgattgcactgtggtctgagagatagtttgttataatttctgttcttttacatttgctgaggagagctttacttccaactatgtggtcaattttggaataggtgtggtgtggtgctgaaaaaaatgtatattctgttgatttggggtggagagttctgtagatgtctattaggtctgcttggtgcagagctgagttcaattcctgggtatccttgttgactttctgtctcgttgatctgtctaatgttgacagtggggtgttaaagtctcccattattaatgtgtgggagtctaagtctctttgtaggtcactcaggacttgctttatgaatctgggtgctcctgtattgggtgcataaatatttaggatagttagctcctcttgttgaattgatccctttaccattatgtaatggccttctttgtctcttttgatctttgttggtttaaagtctgttttatcagagactaggattgcaacccctgcctttttttgttttccattggcttggtagatcttcctccatccttttattttgagcctatgtgtgtctctgcacgtgagatgggtttcctgaatacagcacactgatgggtcttgactctttatccaacttgccagtctgtgtcttttaattgcagaatttagtccatttatatttaaagttaatattgttatgtgtgaatttgatcctgtcattatgatgttagctggtgattttgctcattagttgatgcagtttcttcctagtctcgatggtctttacattttggcatgattttgcagcggctggtaccggttgttcctttccatgtttagcacttccttcaggagctcttttagggcaggcctggtggtgacaaaatctctcagcatttgcttgtctataaagtattttatttctccttcacttatgaagcttagtttggctggatatgaaattctgggttgaaaattcttttctttaagaatgttgaatattggcccccactctcttctggcttgttgggtttctgccgagagatccgctgttagtctgatgggctttcctttgagggtaacccgacctttctctctggctgcccttaacattttttccttcatttcaactttggtgaatctgacaattatgtgtcttggagttgctcttctcgaggagtatctttgtggcgttctctgtatttcctgaatctgaacgttggcctgccttgctagattggggaagttctcctggataatatcctgcagagtgttttccaacttggttccattctccacatcactttcaggtacaccaatcagacgtagatttggtcttttcacatagtcccatatttcttggaggctttgctcatttctttttattcttttttctctaaacttcccttctcgcttcatttcattcatttcatcttccattgctgataccctttcttccagttgatcgcatcagctcctgaggcttctgcattcttcacgtagttctcgagccttggttttcagctccatcagctcctttaagcacttctctgtattggttattctagttatacattcttctaaatttttttcaaagttttcaacttctttgcctttggtttgaatgtcctcccgtagctcagagtaatttgatcgtctgaagccttcttctctcagctcgtcaaaatcattctccatccagctttgttccgttgctggtgaggaactgcgttcctttggaggaggagaggcgctctgcgttttagagtttccagtttttctgttctgttttttccccatctttgtggttttatctacttttggtctttgatgatggtgatgtacagatgggttttcggtgtagatgtcctttctgtttgttagttttccttctaacagacaggaccctcagctgcaggtctgttggaataccctgccgtgtgaggtgtcagtgtgcccctgctggggggtgcctcccagttaggctgctcgggggtcaggggtcagggacccacttgaggaggcagtctgcccgttctcagatctccagctgcgtgctgggagaaccactgctctcttcaaagctgtcagacagggacacttaagtctgcagaggttactgctgtctttttgtttgtctgtgccctgcccccagaggtggagcctacagaggcaggcaggcctccttgagctgtggtgggctccacccagttcgagcttcccggctgctttgtttacctaagcaagcctgggcaatggcgggcgcccctcccccagcctcgttgccgccttgcagtttgatctcagactgctgtgctagcaatcagcgagattccgtgggcgtaggaccctctgagccaggtgtgggatatagtctcgtggtgcgccgtttcttaagccggtctgaaaagcgcaatattcgggtgggagtgacccgattttccaggtgcgtccgtcacccctttctttgactcggaaagggaactccctgaccccttgcgcttcccaggtgaggcaatgcctcgacctgcttcggctcgcgcacggtgcgcgcacacactggcctgcgcccactgtctggcactccctagtgagaagaacccggtacctcagatggaaatgcagaaatcacccgtcttctgcgtcgctcacgctgggagctgtagaccggagctgttcctattcggccatcttggctcctccccccagtgttgaattttatcagaagccttttctgcacctattgagatgatcatgtggtttttgtctttagttctgtttatttgatgaatcacatttattgatttgcatatgttgaaccaaccttgcatcccgtataagtgtacttgatcatggtggattaacttttaatgtgttgctggattcagtttgcaagtattttgttgaggatttttgcatcaatgttcatcaaagatattgacctgaagttttctttttttattgtgtctctgtcatgttttagtatcaaggtgatgctggcctcatagaatgagttaagaggagtccctcctcctcaatttttttggagtagtttctgtaggaatagtacctgctcgtctttgtacatttccactgatcattttactgtctccatagttttgtcttttccaaaatgtcatatagttgcaatcatatagtatgtagccttttcagactgccttatttcgtttagaaatatgcaattaagtttcttctatgtctttttgtggcttaatagctcctttctttgtagcactgaatagtattccattgtatggatgtaccacagtttgtttatccattcacctgttgaaagatctcttggttgcttccaagtctttgcaattacaaataaagctgctctaagcattcgtgtgcaggtttttttgttttgttttgttttgttttgttttgagacagagtcttactctgtcacctaggctggagtgcaatggtgtgatctcggctcactgtagcctccatctcccaggttctagcaattctcatgcctcagcctccccagtagctgggattacaggcacccaccactacgcctggctaattttttctatttttagtagagatggggttttaccatgttggccaggctggtcttgtactcctgacctcaggtgatccatccgcctcgacctcccaaagtgctgggcatgagccacgatgcccagcccctgtgtaggtttttatgtagacataatttgcagcttatttgagtaaataccatggagcacagttcctacactgtatggtaagaatgtatttagttttatgagaaattgccaaactaccttccaaaatggctgtaacattttatattccagagagcagtaaattagagtttctgttgtcttacatcctcaccagcatttggtggtgtcagtgttttagattttcaccattctaattggcatgtagtggtatctcgttgttttagtttgcagttccctaatatgatattgagcatcttttcatatgcatatttgccatctgtttattttctttggtaaagtatctgtttagctcaactctcttttgccttttttttttttaaatactgggtcttgctatgttgccccgactggatttaaattcctgggctcaagtgatcccagtgcctcagcatactgagtagctgggactgcaggcacataccaccatttgttaattgttttctcattgttgacttttaagcattctttttagattttatatttctggggttttgttttgtttttttgagacagagtctcacttccgtcacccaggctggagtgcagtggtataatctcggctcactgcaacctctacctcctgggttcaagcaattctagtgcctcagcctcctgcatagctggaattacaggcgcacgccgccacacccagctaatttttgtatttttagtagatagggtttcgccatgttggccaggctggtcgcaaactcctgacctcaagtgatctgcccgcctcagcctcccaaagtgctgagattacaggcatgagctaccatgcccagccaatttctgttctttatatgtgttttgcaaagatttttttttccccattttgtggcttgctgttttattctcttaacagtgtctttcaaagagcagaagtgtttaaatgttcttaaatatattgggtcaatcttttgtttgtttgttttaagaaatcagtgtattaaatttatatacaaaattgattcttagctatgttttaattttgttagcatcagtcactaataacaaaactgagattgttctacttggtagaatttagagggattttgccctccctctaaatcctatctaaaaacttttataactttcctcttctgttcattatgagatagacctgtgatgactgcctgtgtacttcaaagtcctttctctgagttttcttagttggtcactaaaacaggcaacattctacttggcagagacaaaatgttgatcatttctataatattttgtttggaggttataaatcattgcagcttctcattgacatggcttatttcaggttaggaaccagaacctagggctctcctcccatgaaattctactaaagccagggtgtatcagtaaaaatgtaatcctaccccagtacacatgtaaagtagagaattgcatgcaaagtgccggttttcatatatggaaatacactcttttgcaggtgcacctttgcttctcacttaggaaataagccgaaaaattgacaaccgagcttctcttttgagaagatcaagatacttatttagcaactggagaacagtgtagtgtaatggtaaaagaccaagctcttgggttagaaagacttggattcaagtctcagtgtaaggcacactacgtaacctctataagcctccatgttcacatctgtaaaatggagttaatgcctattatacagggtcatattgatagaattaaatgctctgtattaattaggtgcagaccaaaacagactcttttgatagattaaatgtttatccccttcgtccattcccttatctggaccaatgaaatgagtttgctttccactaaggacatggaaacataccttgaatttcttcatcttgcatgagaattattttcagaatctttctctagccttcactcacaggggaactggccccaggtgcacgttttgagtgctttcccacagtttacctcagctgtactctcctactaataatgccttcctgaaactaggcacttagaatggtcccaggccacagccagacatggcctcccatgtggcttcaggtcagccagagccagtcaatccgatatcctactactcgtaccctcttcttctgtttatgacattatggatccaaatacagataggtgtgcagctacttaaataagtctaactccagtaataccaaaataaccctaaatctgcaacagatgcaaggatgccccctgggggcaattgttaagtgtgatgacagctgggcatcaattaatacatttgtcacctgctcatgagataggatcatgggaggtttggcaaagggacagtctgttgaacactgcacaaaacttagtagcaagaaaaattatttgtgcaggtattcatttttattttactttaatgttctgccttatctagttgcctgttttgagtcacaactttctctgtgcatttagatgaggttaataagatggctggtgagagcagtgcccccttcagccaagattaccaaaaaaaaccttgttcaaatgcccctcagaatttttcctgggaaatatgggccttctcattatgggcttaatgttcataatttattaggtaataactatttaaaataaaactaagtaaagcagaaaatatatacttttctaacatttggagacttgtttgctaaattaaaagacgaagtgccaagactataaattactttcgtatgttgagggtgaatgtttaaattgtacttttttatttttaacagaatgtttactcatgagcttagcatttaaatggttaaaacaaggctttgaagttaacactccattaagatgaatgggggtaattcacacctctgcttgtgctatattatttcagtctggttgcagagaaaacaagacagcagtaggttgatttactgtgtgaaggccctttaaacacccaaggtctggaaatctttggggtgtgtgtgtgtgtgtgtatgcttttccatctagaagcaggatctgaaattcaatacaatctaggtatagaatcgaggtcttgaaaatactaaagattctctgctatccagcaattccatatctggcatttgacgggtagcacgttactggatcaacccaacctctctggctttgtttgctactgtactgtagtgtttcttcctaccacagcattttttaaacttcagcttagtatactggtaaatccatcagtggaaaagcagaaacgaattatccattttccggtgaactttgtatgtgccttcagatgggttatgagctaagcattggtcttcatgtgctcctttttaaaacattttcatctttgcaaaatctcctgttctatatttacctacatataaagcatctacctttaagaactttacaattttttctcatatccctggggtagtgaagtaagcagagatcagttgaaaaagagacatttctttctcaatgtgtcctttaaaccagttctatattgtatttgaaatgtgtattccacccattggtggaagtgctacagccatttgaccctgaaatgattcattttagggcctgggaataaggttatcttaacacaaatgaaatggcaaacactgtataagatgttaatgagtttggaagatctatctttaaggtaaacagatttttctcttctctcttctctgtcctgcatgtttgcaggctcaggttactgggtaatctgtgggtagctaggtgtggagagtacttccactctggctggctgtagtgctgacactgccaatacagtatatacagagagaaaatagatgctagaaacagagggactcaaactgaattaattttaacctgtttttctttttggcatgttaacagctctctgtggctgtgttagaattagccctatgttaaacatactttacttcctgcaaatttttctgcctagattttaggtgtcataatttttgaccttagaacatttcagaatctttttattgtactgagaaatttgttttttaaaaaactcaaatacacaatttattcttctgataatcttcctgtattttttccataaggaggtaggaaaagtaggaaacaaaattttgatggaggatgaataaagatattgtggacatggtttctttattgcaatcagaatcctttctgtttgtcacccttcctaaacaatctgataaatgtgtttattatcacagtaatctgttgtcctgctttgccaagctgtcagtcaggacaagcaattataaggaacaggaagactcatcttggctgatggccaggtgggcaggtgggaataagaggtttattcacctgtggtacaaagtaaatgggtagaaaggaaaattgagttgccagggagaaaaaaaaaacacaaaaacagatggatgaaaagacattgtaatatgggatgctataaagaaaaagacttgcagagaaatgtttctcacttgtttgagtgtacagtcatcccttgggggattggttccaggatctccctcatatatcaaaatccatgcacattcaagtcctgctgcagaaccacatatacaaaatatcaaccctgtgtaaacatgcgcagattttgcatcctgaaaatactatattttttatccgtatttgattgaaaaaagtcaactgttagtgaacccgtgcagttgaaacccatgttgttcaagagtcaactgtgtatatattttatctagtgttcatcagtggacagatacacaacacaagcaaaagggctggctaattcattcagcaaattcttagcacatattatgtcctagaagttgagctagtcccaaggtcatgaaactatgtaagacatacatacatcttgcttgaaaaaagttcagatacaacttttatttttctgactgaacattttcagaccaacttgataagtgaaattgcttaaatgaaaaattatacatgtatttttaatatatacatatgtttttaaaaaaagattttggagtcaaaattacctgtgttcgaatcccagcttctgtctctttctatatctttctaattttggacaagttactattctctgaacttgctgaagactcaatatttgactgggttttctctcaaccagaggaaactctccttcaagtgagattacatatttgggaaaaactcgagtaagccgttaagcattgaatatacgtacacttttattactttactgtccctcaaatcacataacttccaaccatgttgtctcttctgccgtctctgcttcagacatttagtcagcagcctgactagaaaacggtattctagaaatatcctgaccaatgcatttattttcactactgatgtatttttccccggaaaaagtaattcttgtagtttcatagtaaatattatccacatattttgactttacatcagcatttttagcaatgacattacacttttggcttataaagtatgtggtcagaaaagctgcaggccttttttaggtaaattaccctggtttctagaaccctgtacttgtgctgttgatttacattttttaaatatgagggaatatacatgcacacacacacacatatatatatatacacatatgtataggtacacatatacatacatacatatgtatctgttatctatgtgttaaatttcatcctgttagcttcagtgcaccacttaagcagttgagatcttttttttgaatcttgattctagtgcatcagtcaccattcccgcttttgtgacattcttcatcatacttacattttttcatcccattcacagataaaaatgttaaatgagacaagactaaccagagggccctgcagcccaccgctatcagtatttctcttgagttgttattaatctatactttggatgaagttgttaatattcctgtagtgtcatctaacctgcatttcctcacttcccttggaagtgacccccaaatcagtgggtacagcctaaactcctatctgttttctgtatttctagttgcttcagaacatttctgcttgggggctccacaatcacttcaaacttaacatgtccaaatccattcctcactacagttttctcatatctgtcagcagcccctgttttcatccaacatcccaactggctttcttgcttccattcctgctacctacagtccactttcatactgcaaagtagttgtttaaaaattcaaatcagattatattgctaccctgattaatttcctccaagggctttccatctcacttagaatgaaatccatgccatggcctacaaggctcaattttgtctgtacctacttatttctctgatgtcaatgtatctttcattctccagccacactggcctttctgcccctggaacacaccaagcttgttccctcacacttactgttttccctacttagagcataattttcaaagacctttgcaagccgggcttcttatttaagcctcgggtcaactgtcaccccctcagagaggtctgccctgcctgtcttatggtcatgaccgtcttatggcccccaacacatggtagtgcttttaactttaccctgttatacaggtcactgctggaaatcttgtttatgtgttgtctgtgtccactagactgaaagtttcataagaactgggacataactgtcttatttataaccaaatcctcagagcttaggacagtgcctggtactttggagtggcttaatatttgttgaatgaatgcataaaggaatctaacagactgtgtccttctactctttacctctaatctgtcacaatgtcagttcttctttgaaatgcctcctagatttgcttttatgctgacccagcctcctgccagactcctatctaaatctcagccttcatctctttgtgcctgaagtattgcagtgattatcacttcaggctgttctttggcatcacttgggcaactttgcaaaaattaccacatgcaggttccaccccagccaattaaatccaaatctctgagggttacgacccaggcatcgataaacttcttagagcttcccagatgactccaatgcacaactactggattgccatatctacctgctagcagatgtatgtcttccagcccattttgcctgttactgttctctggtctccttggaatcctgctttcatagtattactctcttgctcaagaacctataatggctcactactacccccattaatcccagataatggctcactgctacccccattaatcccagataatggctcgctactacccccattaatcccagattcccttgcctcatccactaagctatatttgagccctttcttacgtatgttctacaatacccttaaactgttttttctgtctagcacttgatttgccttttattaccctcttctatattgttactcctctccctactcccacttccaggtacatacccagaatgtgacttattttccacctatccaaatgcttctcattcttcaacacccagctcaaatcccacttctgtaaacactttattctccactctagtctaccccttattatctgtatgattattttggtataccattagtaccttgtaagatttttcgtatttttttcataaactacttttgtaattttgtattcagtttttgagtgggtaatgtgcacatggtacagattttaaatttacaaaaataccctcccatccaattctatccccagcatccagttttcctccttggaagcaaccacttttacaactttctgtgttcttcccagtatattctatgcctctcttagagagagagagagagaatacacaaacacaaggagaatacacggatatacacccgcaaatgttggcatacaacatgaaatcctttgcccctttgacttctctttacttaacattatgactttttttagttgtgctaaaacaaaaaataaacaacacctaacatgaaatctgccctcttaacaaacttgtaagtgtacgatatagtgttgttaattatatgcacattgtatagtagatacctaaaactttttcatccggcatgactaaaactctgtgcctaattgaacagcaactccctatttccctgttcctgcagtccctggcaactgccattttactttttgcttctatgagtttgactgctctcgccatcttgtaccaaggaatcatgtagtattttgtccttttgtgactggcttgtttcacttagcatattgtcctcaagtattatgcatattgcagcacatggaagaattttcttcattctttaaggctgaataatattccattgtatgtgtataccacaatttctttatccatgaatctgccaatagacatttaggttgttttcacctcttggctattgtggataatgcagcaacaaacatgggagtgcaaatatctcttccaagattctgttttcaatcattttgtttaaatatccagaagtgagattgctgtatcatacggtagttctattttaaattttttgaagaatctctatactggtttccttaatggttgcactattttatgtttctatcagcagtgcacgagggttccaatttctccatatccttgccagcatttgttttttgttattttgataatgatcatcctaacaggtgtgaggcaatatctcattgtggttttgttttgcatttccctgataagtagtgatgttgagcatcttcatataatgtctggtcgtttgtatgtctttggggaaatttctttcatgtcctttgcccattttaaaatttaatttttttgttactgagttgttgtagttccttctatattttgtatattaaccccttatcagatatgcggtttgcaaatattttctctctccttaagatttttattctgttgattatttcttttgctgtgcagaatctcttctgttggatgttgtcccacttgtctatttttgatttagcattatgttttggagattattttgtatcagtatacacaaaactccctaaatattttaacagctgcatagtattctgttaatgcatagaccataatttaattagctagtttcctatcaatgcatattgagggattttttattttcaaatgttgcaattttatataatgcttcaaatgttatctttgtatacatatgtcatttagcacatatattaatatatctgtagtatatatttctatccatttaactggaattctgggtcaaagggcatgtgcatttttaattttggtaggtattactacattgaccttcattaaagattttattggctgggcacagtggctcatgcctgtaatcacagtactttgggaggctgaggtgagtggatcactcgagcccagaaattcaagaccagcctgggcaacatggcaaatccctctctctacaaaaaatacaaaaattagccaggtgtggtggcgtgtggccatagtccgagctacttgcgaggctgaggtgggaggattacatgatcccagggaggttgaggctgcagtgagttgtgattgctctactgcactgtagcctgggtgacagagtaaaatcctgtctcaaaaaaaaaaaaaggaaaaaagaagatatactgatttatattcacaacaactatgtaggaattaccctttcaattttgtgttgttatttagcttttcacatttaaatactttacctctctgactccgttgtaattaacccaaagacaggaactatgacattacatattagcatctctcacagtagttggtgctcagtaaatatttgttaaatcttgtgtatttagggagttttcccatgagtggcgtttctgatgagtcccatgtgagaattgtcccctttgcatgtttgctgtttccaggaaagggtgtgattgtgtgtgatattcttaggcgagatgcttagtctattttgtgttgctggagcctgggaaatccaatatcaaggtaccaacacgtttggtgtctggtgagggccttgtctccactcccaagatggcctttgaatgttccaccctctggaggggaggaatactgttcctcaaatgacacataagtgaaaagagaaagcccgcttccaaaggcacttttattttattttatttttattatttttatttttaatctttgtgagtacatagtaggtgtatatatttatggagtacatgacatgtttcgatacagacatgcaatgtgaaacagtcacaccatggagaatggggtatccatcccctcaagcatttatcctttgtgttacaaacaatccaattatacttagttatttttaaatgtgcgattaagtaattattgactatagtcatcctgttatgctatcaaatagtaggtcttactcatattttctatttttttgtgctcatttaccattttcaccctgcccctactaccccacaacccttgtcagcctctggtaaccatccttctgctctgtatgtccatgaattcaactgttttgatttttagatcccacagataagtgagaacatttgatgtttgtctttctgtgtctggtttatttcacttaacataatggtctccagttccatccatgttgttgcaaatgaaaagatctcattgtttttatggctgaatagcactccattgtgtatatgttccacattttctttattcattcatctgttgatggacacttaggttacttccaaatcttggctattatgaacagtactgcaacaaacatgggagtgcagatagctcttcagtatacctattttctttcttttgggtatacactcagcagtgggattgctggaccatatggtagctctatttttagttttttgaggaacctccaaactgttctctacagtggttgtactaatttacatcccccccaacagtgcataaaggtcccctttccccttttctccacatcctctccggcatttattattatctgtattttttataaaagccatttttattggggtgagatgatatggcaattttgatttgcatttctctgatgatcagtgatgttgagcaccttttcatatgtctgttagccatttgtttgtcctcttttgagaaatgtctattcaaatattttgcccattttttgattggattattatattttttccaatggagttgtttgagttcctcatatattctgattcttaatcccacttcagatgggtagtttgcagatattttcttctgaaagcacttttattatgatattaaacctactgaggaaggtggagccctcatggcctaatcacctcttaaaggctccatctcccaataccattacattggcaattaaatttcaacgtgagttttggggggaacaaacatttaacccatagcagacaccattcatttatatttttcttccaggatcctgtattatcattaactcagaaaggccaactaatccttggatctattatcaaatttggtttgtttgaataattaagtataaattagctaaatggaaaggctctcctctgtaagttctttaccatctttttatgatgaaaaattttaaacatgaatgcaagttgaaataatatgcccatatacctaccactgaaacttagcatttggtcgtatttattttgtgactcacatataaattatatttatatgtaaatatacagttaactttagaacaacatgggttttctaactgtgtgggtccacttatatggggatttttttctgcctctgccaccccgagaaggcaagaccaacccctcccctgccttcttctcagcctcctcaacatgaagacaatgagaatgaagacctttatgatgatccagtttcacttaatagtaaatatgttttctctttcttatgattttcttaatgacatttttgtttctctagcttactttattgtaagaaaatagtatataatacaaataacatacaaaatgtgtgttaatcaactgttattggtagggcttacagtcaacagtaggctattagcagttaagttttggtgggagagtcaaaaattgtacacagattttcaactgtgtggtgggtgggcacctctgacccccacattgttcaaaggtcaactgtaaatacatttatatttgctgaataatttgcaaagtaagttactgacattccatgaagcagtaagtaaagttgaaaattattttttgtaaaagtcaccatctaccttagctcaggctactataacaaaataccatagattggatggcttaacagaaatttatttctcatagctctggaagctgggaagtccaagaacatggtgctggctagaattattttggtcctggtgagggcctcttcctggcttgcaaatggctgccttcttgtgtcctcacatggtggagaaagagtgatctctgttcctcttcctataaagccactaatcccattatgagggtctcaccctcatcacttaatctaaccctgattatctcccaaagaccccatcttgaaatacttgtgggttagggcctcaatatgaattgaggggttggaggagacacaattctgtccacagaactttctgtgaacaagcctattattccctccctccctccctcccttccttccttccttctctttcttttctttctttcttctttcacaaatgttgtccctttctccaaaaggataagaagctgcttgatgcagctgtcaccagaacttctcttagtaagggaaatatccttaatgtctttttttttttggtggtggtggggaatatcttgataagtcatttaggtatgaacggtgaattcttatacagtggcacagcaatgtgagtttactaaatgcctgtgaattgtatactttaaagagggtcattttatgttatgtgaatttcacctcaatcaaaaaaaatgtgaccctatgaaaatggttggcaagaggagaggaagtgagagagatagctaaaccactctgcataaaagagaaaatgtgaatttgggaactggagaaaagcaaagggaaagaggcagagagtgctaacccagtggtgggagtctagaggaaaagtggctgacgggcattttaagaacagaagcgtttaatattcagttttaatttgcctgtctctgtctcctgaaactaataaagtcagtagacacaaaaataccttgtgtgaacagaattgtgcatgtaaacccttctttagactcacatgggacagaacacatacagccttatgctatccaggtgatccagaaacctcaaaaagtgaaattcaaaggcagagatggccaagaaaaaatgtaagccacttgcttcctcccagagtccgtgggcacatcaggagggttgtgggacgatcctcatatgagggatgtgattgaaccaacttttcctaattctcaaagtgtattgaactttccttgacatctcattggcaatatattgtcatttcattgctttaagggctcattatttactagtcatcaattgtacctgtaggggaatgcctctttttagagacaagagaccagacctccacagaggtagatcttggagattggagcagttctagaatttctaacatttccccttacggtcatcttgctaggttctctgtaacaaagcctggtagttcagaaatcaggctccaagaacgtgccatagatcaacctgtttgtgtgtgtgtgtgtgtgtgtgtgtgtgtgtgtgtgtgtgtgtgtgtgtatgtatttgggatcagagccactcaacttcctttttttttgaaacggagtttcactttttttgcccagactggagtgcaatgctgtgatctcggctcactgtaacctccacctcccaggttcaagcaattctcctgcctcagcctcccaagtagctgggattacaggcatgagccaccacacccagctaattttgtatttttagtagagacgaggtttctccatgttcatcaggctggtcttgaactcccgacctcaggtgatctgcccgtcttggcctcccaaagtgctgggattgcaggcatgagccaccacacccggccttcaactcaacttctacttagatggtggcagtaggaatcagagggagtggggcccctagggaagagcactcccatggaaaaagagtagaaacaaattttataattccctggttttcttacccagttctccaacctgctaaaatctgaaaaagtttcatactttaaatgaatggaagatcattagtctcataaaataatatgacactactgagctggcacttcggtgtatagaccaggttctatgccaagcacattctcatgtaatctgaggtaagcacagttatattccccatttaatagattagaaattaaagtttagagagactgtaaggttaaatgacttgttcaaggttatacatccttaagatgccatcctaagaatagaaactgaagtttgactataaaggctatgtgcttaattaccatgtaaataaagtgtatccaactgttggagtttttttctacaaaaaggttctgctcatagcagatacatagtcaatattgactgtgttgaaggctgctttattcatttaaaatgtggcacctaaatctgttctgttacatcagccagacagtattttggccggccttgtgtcctcttgagtcatggttcattgccacagcactgttgtttctcctttgttaagtatttcagaggaaattctggacaaaggaaaggtatatgggtcttcaagtagagcagggatgtgttccagtagttgtcaactagactgagaaaacttggatgtcttacgaaacaatgtcagaaatccatttctgtgttctgtgactttctacaaacacaatttttaaaaatccaaatatagcttagaccatcagtagtctaattcagtgtttcccagatttgagatttcttttggaactttagaacgtcaaaatgaatcttgggacattgataagattgcagactttttattttataaattgattaaggatattaaacttgccactttcaatataaaaaattaaggaaggttataacctttgtgaaaaacttgctacatagttatttatctcatcaaagaccagtgaaaactttctcatagaccaacacttggaaactatcagtctaaataaccagtctatattcaaaaattcagtaaagatttcttcacttctaatgctcattgacttcagttatcttataggtggaaagaagtagatacaaaaacagatcttgattacaaaattcgttgatgacctagttgactctttccccagtcattactaatcctaacctttgggagcgaaaaatatctaaataagttctggtttacaaatttgcaaaatttttgtcaacacttcagaattcagaaaaaaacacaggacatttttactatataacttcctaagtttatatgatatatcaaaagtcagtaaggattataccataataatatttacatttcacagggaagcaaaatacttggagcctctccttgtctttgtctaaagatttgtcattcatttgcattcaaataaattctttgctttcattcatccagaatggttctcaatttattagctcatgagactacataaatagacttgtattcatacattttaatttcagtgtaaaatggctttcctcaatttttttttctactcaactctcccaaaagatgtctaatcactcccacactcagttacttaaacatttcataatgttgttacttctatagtaaaacaaaaagtaatttgcttttaataaatcagagagccctactgtagcaatctagaactttattctggcgagagcaaattctcaaattatatttccagcctcatttgtgaatagctgattttccctgtcacaaagcattgttaggtaggtacagtatttttctttagttggtaaactactggaacttacaatccaatggaggtgacctctatacaatacctgggacggtaataccctgaagcgcagggtgtggctattgcatgtgccacatgcacatgaggccatctgtgcgtgcttgttgaaagaatgacatatcttggtgagtaatatgaacattaaaagctctgctggataagctcatagaggtggggttcactgccttctgggtgagtggggaagactttgtgaagaaagcaacaactgaagtaaaattgaaggataaccaaagtagaaatgagaatgaaaggaagatactcctgtttggaaagaaaatactaacaatatgtacaggaaaatacaaggtatactttggagatgacaagtaaaaattttgccaggagcacagatgtaatagcaatttgagaagtaaagctgaagggtaggatcctgatgtagagaatgctggacccaggctgagcttggactttacatcaagtagaagtggtagagaaagattaattgcctctctgcattggactagtgccatcgtcttccaaaagctaaaaagaagcactttaggccttcaagggctagttatctaaaaaccacacttgatttgttcttaagtctcagctcctgggcatatgaggaactttttctggagttttggaaaattcctcatgccctcagatcctattaagacctctggcatcttttttttttaattatttaatttatttatttttattttttattttatttatttatttatttatttattttgagacagggtctcattctgtcgcacaggttggcgtgcagtggtgtgatctcagctcattgcaacctctgcctcccggactcaagcaatcctcccacctcagcctccagagtagctgagactacaggtatgcgccaccatgcccagctaatttttgtactttttgtagagacagggtttcaccatgttgcccaggctagtctcgaactcctgagctcaagcaatccgcccactttggcctcccaaaattctgggattacaggcgtgagccaccgagccaggtcaagacctctggcatcttaagagacttcctatgagttcctgcctccaaacttttttttttttttttttttttgagacagagtctcgctctgtcgcccaggctggagtgcagtggcgggtattggcttactgcaacctctgcctcccgggttcaagcgattctcctgcctccacctcctgagtagctgggattacaggcacacactactacacctagctaatttttctatttttattagaggcggggtttcaccatgttggtcaggctggtctcgaacttctgacctctggtgatctacccacctcagcctcccagagtgctgggattacaggtgtgagccactgtgcccggcctcctgcctccaaacttttgcacaaaccattcatgttgtttttctctttcccctccaaagcgtttcttctccctcaaaacctgtttccacactcaacctcctctagaaggacttacctgactatgacttaatgtaactgctccattactcaggaaacctatgctcaacatcttgatgctacatttaatttctctaaatgataaaatatacaaattcttgtatatttgtatgtctaaccaccctgcgacagcctttaggaaaggttccacatctgccaactcctttgtatcctccatccagaacctgcctcccatccctactttacccatccacctcagagacttcatggtacagtgcagtatacttggtgagtgttgatggtttaagagtgtgccctgaacaacgaaggatttctttgaggctgaaatcctgtgggatccatggaatgggagtttcacctgtctttggcttctgctcctttccccagcatgtgtagagcttctagaacagtccccagcaagagaggatcacttggtacacctctttcttatcctcactgtctccagtctctgctgtaggcctgctagtgatgatcaggatacaggttttaacatggccaagctgttaataacctgagattgggcaccatgaacaataagcattaaaaggcaataacaacaacaacaacataacctgttaattttatgcaggcttaattttttaaagaactatttcttcctaacttgcttttactcttcttcatctactttctcatacctatgactgacaatgataaggacacccacccactatacacacctaattccatccctccaaatttgatttcgtgttctctagagctggcgtgttatgtgacctattgtggggagaggctcagctgagggactctgtgatgccaaatggacaaaggcacacttttttctccaggtcccagcctggtgaaagtcatagcacctgagaatttggagctgactctctcctttggaaattgtgccttccaaaaatatatcttacactgcctgtacctgcatgcaataggttttggttcttaccaactgcagcttcagtctgaacttgagttctaccctcatggatgcaaatcaaaacagctcagaatcaagtctgggaagcaagtcgaagtggtttgatttgcatggggagcttttgtctctgcatgaaggcagccaaattccctaggctccccagccctccggaaatatgctttacaggacccgggggcccaggcccagtcgggtgggtgtgatttgaatgttctctgctacagctgctgcaccgggccctggtcactgctgttggtttcgctccattttactgcctcagaatccccctgtgcatgttagtggttaatacagcagccaggagacgccagacagctctcggcacctggttcaaatttaaggctcatttacacatgatgtcacacacgcattgtcagcgcgagggaggtcaggatggttcattttgggaaggttcacattgttgagtctttacaacactcactgctattaatgctttaaccatctgacttggatttcggttttctggcatgaggtaatcccaggcactagatttatatgctgaatgggaagccagcaatggtggctaatcatgctggtttgcagatctgcacctctggagccttgggatggaattagagggccacatggcaagtagcaaatcataggcgttttgagcaggagaggaattagccagacctggaagcaggggccatagatggggtgttgtctgagccaggaagtttgattgaagaatggaaaccaaggtaaattggacaaggatctgggcccagagaccacaggaattattctactttgaccagtgcgttgggtcattgcttgaactgtccttttgctcatcactcatagaaatcccagacccatcttcccaggtccagcgtaagtctttcatgttccatgaagcctttcctgaccacccatcccacagcaggggctgaggtggttagatcaccagaggtcagaagttcgagaccagcctgaccaacatggtgaaaccccatctctaataaaaatacaaaaattagctaggcgtagtagtgtgtgcctgtaatcccagctactcaggaggtggaggcaggagaatcgcttgaacccgggaggcagaggttgcagtaagccaatacccgccactgcactccagcctgggcgacagagcgagactctgtctcaaaaaaaaatttctctcctgaatccctaagtacttttgttactgagtacttaatttgtgcgactagctcattttaccctcacaattccaaagggaaggctttattatttctcttttacagatgacaagacaggttcagagaggttaaataatgtatccagtgtcaaacttttaaaagtcaggatggaatcctgattccaagcttaggttctgaaccactggggtaggctgtgtagtactacattttctgtggaacgtggtatcggtaacatgggagagacaggctgtgcctcaggaagatgccacatgggagtgcacagcagtgctgtagtgcctcgtgtttatgtgtagtcccaggtgcctggctgtaaacaactgcagggcagtgaccatcacctctgcttttctgcatccccacacttcctaacacagtgtcccccaaagtgtgcatcaatggatggatgaatattagcacccccgcaccaccctcacctaaaacatactgaaaagtttgagatctttggataaccaccccatcccctgctgttgtcttctgtcatacggctgaaatcgtaaaactggtctgcctgtcacagctccagtgagcctacttactcactggaaattcagagaatgtctttagtcctgttgactgctttgattttgttttttaacttgtaccaagacctgttgccatgatgggtctctgcaaatgggctttcttgttccatgagtctctgttttagtcaagtgaagggcacactccttttcattggccacctcttacttttcctccaagaggagtactcactcccagaaccctttgctgggctctcatgccgagcttaggtgccccttcagtgtgcttctgcagcactcattaccccgtagtagcattgtagtttaattcctgtttgcttgactgaagcagagactcacctgcagacgcctgtaggtgccttccacgttgctcagatgaacagtagagaagggtcaggcctgccctaggtttctacccctctcctcaaggccctttctagtcaccatgccacatcctgctcatgactgcagggatcatgcctctgggcctctgtccatgcagctgcctctgcctgcactccaggacaggggccttctctgctgtccactggagccctgtggaagggactcctgaccctagccttagggaagtcatctctaaaggctgttttattacagtgtttcctcagaatgaccctatagacacagtgttttctcagtgtcctctcacctttgaacatatccgggaataattgaaaaaaccaggcaatcaaatgtgcctctcataaatcaccatcacttcagagcagaacttaagagtttggtttgcaagccacaccaaatagtttgagcttggccctctaccatttcctcctgctctgagcccagaggttcacctagtggactgtagcaatggattcccttgcccctggcttcctgttgggttcagccagagagcagcaccagtgggagcctacagagggaggaaagtgaggtcaaggtgtctgctgcctcctccctgcctgccaggccactgtgggtagactacacctcaggtggccctccccatgtgtagccatgcttgccaggttctgggttctggaaacctccacctcctcttgccccttcagtcatagggtggtagcccccttcattgctattagctgttatgcactcaattgtgttccaaccccaaattcgtaggttgaggccccaatccccaggacctcagaatgcaactgtatttggagatagggtctttaaagaagtaattaaattaaaatgaggccattaagccctaattcaatgtgactggtgttcttgtaagaaaaggaagagataccatggagatgtgcacccagaggaaaggccacgcaaggacacagcaagaaggcaactgtttacaagccaagggaagaggcctcaggagaaccaaacgtgtccacaccttgatcttgcacttcccaacctccagaactgtgagcaaataaatgatgttgtttaatcacccagtttgtggtattttgttgtggcagttctagcaaactaatacagtggtacttactattccatggggatttccctaaatgttgcttattacagtgtgtaagtccttctggtaagctttccttttgggaagtcatctgtttcttgttgggaccctgatggatatccaggcttagatgccaacaggaggttttagtgacaaaggcaagaaaatctgtcactggaagtgtctccctgctaccggtgtccctccctatcatgtgaacccacctgggtaccctagtgctactccagggtatttccttttcttagaaggtgagtgactttggactgatcattccctgtgagcttcagttttcctcttcgtaaagcataggtaacaaaagctgcctttttggggtattttgaggcaacatgttggatgcagatatgaatggactgcgataacccagtaaggaaacaaggttgctcttctatagcagtatttgtaaacaatttcattgatacatacgcacaaagcattgaaatctttgaaggcaagaaaatggtgatgtttactagggaaggcagctctgagtctagcataggggagactgtgcgatttgcccagcaactttctatgccctcctcccaagtccaggaaaccttgaaaaccacagtgcagcagagacagagacccgtgtaccaacctattctcagtcaggttttcattagctcttcataaacaaccagtcaatcaatttcaacttttacttcacagtctcctgctgtagaggccccatacatacaaccggtgaatggagcatctctttcccttcttccttttcgtttgggaatgaagtcaaatctggaggccagagcagctcagacacctaaataggtacacagtatgcagtaagatgagattctgtttctggctcctcattcctatttccaataaatgaagcttctcaaccatgttattttcacctgcccaagctaaaacacaatcttcactgtccccatagctccaaagagggaaatcctgacataacatggggatgctgctagagtctttgccctctctgcaagctagactcgctactggcccttcccagagtgggccaagagaccaggcttattcctcagttggacatctgacctttcacaaaatagagttctcccctgggaggatgatgcctccagggcaataggaacacttttttgttagcttattactatctctatccaattctacaccacaaggcattcttgtgggtgtgaaaagctattgaggaatgaaatggccctgtgggctagacaggtgaaaagagaataaaatctcagcatgtgaaggtctaggaagagtgtcacttaaacttttaaaaaaaagccagacaaactgcaagtttactactttttttggagagctgaggtcacagggcagccaattagcctaaaaatctaaggactggaggaggcctatgaagaagcatgggacacaagcccttgcttacctggagcagatgtagccaacagaagaactcagcaggagtaggtaaagaattggtggcgaatgagtgaggactggtgagagtatggagaccctggggaatgcatatgtagagggagtttgcaccttcttggagacttttctccatggactccaccaggcactgtatcccaccagaaaagactggccaaagtcctgagaaagaatccctcacagtgcaggtatgggggaaagggaaaatagccactgcaaaggggcatgaaccccaccctttctcctttctagaaaaaaagccttaatctacaggagaaagggaaaaatactgtttcctttagtctactggcaaaacttagggaagaacaaaacaaaatacctctctgtcccaaggaaggggcaggaatacagaaacaagaactaagaatgtattgccaataaatgtacttgagaagaaatgttaaagaagttcttcaggtaggagaaatgtgaaacaagatagaaatgcgtaactaaagacacaaaaatatgaagagcgctggaaattgattaaatgaaggtaaactaagatacatgtaaaatgtttaaatgatcctaaaagataaatgactgtcaagagtaaacatagtagcaatgtattatgtgtgtataggataggtaaaagtaaaatgtatcgtaacaatgatacaaaggttgggagggaggaattgaggagaaattattttaagatccttacattatgaatgaagcagtatattatttgaaggtaaactctgatcaattaaagatgtattgtgtaaatgctaggacaacaactaaaaaatttctcaactataaatcaaataatggagataaaatgcaatcataaaaaagtgttcataagagtagaagtcaatgaaattgaaaaacagaaaaacaataaagtcaataaaaccaaaacctatttcttataaaatatcaataaaattgataagcctttagccagactgacaaaaaatagaggagatacaaattaccaatatcaggaatgaaagagggaaactactacagatcccatagacaataacaagataataagggaatgctataaacaactctatgaccatacattggacaacacagatgaatgaattaatttcttaaaagatacaaatgatcaaaactcaccccagaagaaatatacaattttaatagtgatatatattaaagaaattgaattgtacttataagcctctgaaatattcaacagttaacaaacaagaataggtctagatatttcaatggaaaattctaccagacatttaaagaggaactatcactaattatatacgatatattctagaaaataaaagagggggtaacatctcaattcattttatgaagccagcattaccctgatatcaaggcagataaagacagtttcgaaacctatagaccagtatctctcatgagcattgatgcagaaatactcaacaaaatattagaaattatgaaaagaagaatacaacatgaacaaatgggttatgctgggaaagcaagtttgattttttaaattaatttttaaataataaaataattattccattatattaacagcgtaaagaagaaaagctgcatgattatattaatttatgcagaaaaggcatttgacaaaagtcagcattcattcatgatagttattctcagcaaaataggaattggaaatttcctcaagctgataaagggcatctaaaaaatgaaaacaaaaaacaaccctacagctaatattatacctaatgctgaaagactgaatgttttctcctaatattaggagataagaatatcctctcataccactcctgttcaacattttactgaaaggcctagccagtgcaataaggcaataaaaagaaatatagaacatacagattggaaatgaaaaaaatgaaatagtccctactcactgacaataggattgtttatgtaaaaaaaaaaaaaaatcccaaaccatcaccaaaaaacccgacctaattaatatgtgaattcttaatcatgacatgttatgaatgtccagttttccatgtgtgtgtgtttgtgtgtgtgtttgtgtttgtgtgtgtatttatggagttatcattcttgctttctgactatccagcattcaaacattatcagtattggaggagaatctcaaaatatatgtctttaccagcaagctaaagggaccagatagatatttcttctctctatttcatgggaggtataactatatgactgagtcttgaccgatcaggtgctcccatgctgggctcaaatttcaaggaagtaatgaaattatacaggtggctgttggagatttctcatgaggacagctgaatcaggagtccctcaatgcagaggtttgtgtccggggatggtgggattttgtttataacactaccaggctggaccatgatatgagctggctgtgttcttggttgcctcaccaccctttgttcctgccctgttgccgaccctagttcaccagccttattgttgagtctataagctaccttctaataaggctattttctacctgatatccagagtttattccttctgttgttatcaacaatgtgtgtgtgtgtgtgcatgcgcgcatgtgtgtgtgtgtgtatgtattaaaaaatgggaatggcattatactgcttatattgtcctgttactttattacttaaacatatatactgtcaacatttttccatgtccatgatgttgctctatttaatcattttaattattgcctggcattaacttatagggatttattgtaatctgtttaaccaatctcccatgactggacatttaggttgcttctaacatttatttataataaacaacactgctatgcatatctatacatataaatcttttggattttaactaattatttccttaaagttctagatgtagaattgctatatcaaagggtaggtacgtttttcaggtttttgattcatactgccaaatttcttaacctctccctcaaaaaacttgtgacaatttatactaccatcagtcatatgcctttatgacaatgttgatttccaggcatactaccaacttagattattatctttgtgaaatttttgagttattacttatgttcagtgactttgtaaatatttgttagctgtttgtgattattgctttgtgagtgactgctattgtcttttgttcataattcttttgagggaaaggaacatactttttatttaatttataagagctcataattttatttatatttatatatataagtatatatatatatatgtgtgtgtatatatatatatgtgtgtgtgtatatatatatatatatatatatatatatatatatatatatatgtgtgtgtgtatatatatataattttttttttgagatggagtctctgtctgtcacccaggctggagtgcagtggcatgatctcagctcattgcaacctccacctcccaggttcaaatgattctccttttatattaaggcatctatctgtctaacatctgtggatctatacatcatatatattaaggtataatggccatgtatattgctattttcccccaatttttatttgtgtttttgctttgtttattctattctgaattttttccccatttgtatatagtctattaaacaatgctttatagtttctgtctttggttgatacttcaaaataactttcccgtcccaaaatggtaacagtatttacattttttactggtactcttatgtgtttttttttaataaaataatcatatagaactaattttgttttaaggtacgaggtactagctaacattttcttcagagttactaaattcttaagtatgtttgaatttgtgaactctgtatttctgaacttttcttaatgtctccttaatctatgctagggctaaattactcaattaattaaacaatttcaagatttcagaagttttaatatttaatgagaagtcttcagccttggggtagaatgttgttgcttgttacttagtgctggggagtcaggggtgcgcttgatcctagtacactctcaggctttggcaggccctgtatgcctggatcttaggagtaaggctttctcagaaatcctgcccctcctcctcctcctcctgtggcagctgaaccctgccttgtgtcatgtgcaggagagaatgtctggatctggggctcaggactgtttcttgcccgttccccagggatcaagggtgttttggctttccccttccccaagctgcagtaggtcttcacctgtgccctgactgcaacaggctgtactgtccctccccagtggcttaggtgggaggagggtgtggctgtagccttatgcctttccttcagcaatgttgcccctctttcctgggcctgcactgtgcagggaggcttctttgctctcccaccctgccttcagtcctttctcaatcagtaggtggaagggagtggagaagagcctgcaagtgggcaccaattcctcttgtgtctgcagcccccaggggtgctacactcatgctagtctgcttctggcctttagtaatttgttaaaagctttagatgaattctttttatgtttttgtatggcacccagtgtttcttcccatactcagccacatctcttcttggggacgcagcctttccttagatttcaggcttttgggttccgtgtgatctcagctttctggtggactcaagaaaaggtatgggtttttggtcatctgactttattgttgttgttagggtgggagagacactattttaagctttctttatagtaagcaggaggggaactcctgtgttttcatagctaatcaagcatggaccctgcccttattctctttttaaaaattttcttggctattctcacatatctgttctcttaaatatactttagaatcatttgctcaagtacctcaaacccaaacacctccaaaagaattccttttggattgacatggtatcaaaatatgtaaactgacttcagtcccagatgttgtcgaaacttcattcccaagatctgaatagagcagtcagagcggattgtgattgaaagaccacctccaaggccagcctgcctctaaatcccacctgttttgttttggtgtcttgaaattccagcattagagtgcagaaaaatagttctaggaccttagaggatgaaaatgtatgcagtttgtgttggaaggaccagcataataactaatgtgcaaccatcactgcacttacaaattaaggtcacagatctagacaaagtattgagtgaattaagtgagtcagtgagtgagtgagtatggagagggactctgttaagaacaggggagctagaggggaaatgactggatctggaactgagagcacccgagtagctgagaatgcggactctaaatcttctggggacaagaggagaggagcaaaagccccacagccacctctgtggttgtcacacttcaatctggcagctagagaaaagcccgaaccaggccagataaggctcccctcaaggactatgtagattgtgtgctacaggcaaaaaaggggaaaaccctccaagaggatccagcagtgatcacagctattgatttgtactcccacggcccttgcggccatgcatctcttaaaatcaaatgaaacaaccatcaacaattgtggtaagaattttccagtaggagaaatagagaaaggaaaaaaaattctgagaaaacaaaacaaaacccttcttgatgttttccacagactgctttagaaagagaaagactgatgcaatccaatcaaggacagtgatcctcggttgacccagcatatttcacagacccagaatgcagaaggcacagacgcccacaagcaggcctcagttttgacttcttaaatgcaaccattttttgtaaattaatattgaattttcaaccaactccagcacctcattaaggaggggcctgttctttgccaaactcttccaagggaacctgctgggtttgagtgtaggtgtcagcaaacatttcccagtatgttctaatggggaaatatttattttgtaacactccttcctaaccgaaaatacaattatgtgacatgttttatatgaccaaggggatttgggctaagattttgtatccataatgtgccctaatattgagaaatatcatttttaaagtattctctttggcattgacagggggctacattctggaaaaatagcacttcatgggaatttccctttagccctgagaaaaaatagtttgggaacacataacagtatatttggtttgggatgttaaatcctgcagggtctctgaaagaggcaaatgggtgtgagaaagaattagttactgcaagtttatttcataatggcctataaaaaatatacgtgttccatttctaaagctgctatgcccttactatagctatagctattttttaaaacaagaaagactttccacaagtcattttctactttgggtgggataacatttagagcaaggtataaaggacctttgccagagtaattaccatttaaggcaaaggtctccaagattttacttggagctgaagatcttggcgcagccctggctctgtggaacaccacacacatccagtgaccatgggaaagctggctccctgctgggtagtgctgcagcattagtacaagtctcatgctctgaagggtgaaatgtgatgatctgctaagtgaaggctctgtcaggagaagccagaggagtggtaacagctcaccaaaccaaaatccatgaagtcccagccctttttcatcgtcaccatttttgcatatagaacatgtccctatggggacatccagggagtgggtgccaggactcagtgtgcccagcccaaggccaaagagagtttattagcagaaggatcacttacatgatttggaaccacaggagagagagatgtgtggtggctgaaagcagaacttgggctaatgtttataagagagaccagccaagaagcctatgcattaattagtgttctgctggttgttctgttaggaggcatcattcatcacttaaaataagaccttttatttatttatttattatactttaagttctagagtacatgtgcacaatgtgcaggtttgttacatatgtatacatgtgccatgttggtgtgctgcacccattaactcatcatttacattaggtatatctcctaatgctatccctccccccaccccccacccaaagacaggccccagtgtgtgctgttccccatcctgtgtccaagtgttgtcattgttcacctctcacgtatgagtgagaacatgcggtgtttggttttctgtccttgcaatagtttgctcagaatgatggtttccagcttcatccatgtccctacaaaggacatgaactcatccttttttatggctgcatagtattccatggtgtatatgtgccacattttcttaatccagtatatcactgatggacatttgggttggttccaagtctttgctattgtgaatagtgcctcaataaacatatgtgtgcatgtgtctttatatcagcatgatttatattcctttgggtatatacccagtaatgggatggctgggtcaaatggtatttctagttctagatccttgaggaatcgccacactgccttccacaatggttgaactagtttacagtcccaccaacagtgtaaaagtgttcctatttctccacatcctctccagcacctgttgtttcctgactttttaatgatcgccattctaactggtgtgagatggtatctcatggtggttttgatttgcatttctctgatggccagtgatgatgagcattttttcatgtctgttggctgcataaatgtcttcttttgagaagtgtctgttcatatcctttgcccactttttgatggggttgtttgattttttcttgtaaatttgtttaagttctttgtagattctggatattagccctttgtcagatgggtagattgtaaaaattttctcccattctgtaggttgcctgttcactctgatggtagtttcttttgctgtgcagaagctctttagtttcattagatcccatttgtcaattttggctttggttgccattgcttttggtgttttagtcatgaagtccttgcccatgcctatgtcctgaatggtattgcctaggttttcttctatggtttttatggttttaggtctaacattcaagtctttaatccatcttgaattaattttagtataaggtgtaaggaatggatccagtttcagctttctacatgtggctagccagttttcctagcaccatttattaaatagggtatcctttccccatttcttgtttttctcaggtttgtcaaagatcagatggttgtagatgtgtggtattatttctgagggctctgttctgttccattcatctatatctgttttggtaccagtaacgtgctgttttggttactgtagcctcgtagtatagtttgaagtcaggtagtgtgatgcctccagctttgttcttttggct

SEQ ID NO: 3469 - DNA, 1675 bp, Homo sapiens
cggaatgccggaagggccgggctcaaagctccgcctctggcgcgaccgacgactggagcgcagggcaggggtagaggctcgtagatggaactggtagtcagctggagagcagcatggaggcgtcctgggggagcttcaacgctgagcggggctggtatgtctctgtccagcagcctgaagaagcggaggccgaagagttgagtccgttgctaagcaacgaacttcacagacagcgatccccaggtgtttcatttggtttatcagtgtttaatttgatgaatgccatcatgggaagtggcatccttggcttagcttatgttatggctaataccggtgtctttggatttagcttcttgctgctgacagttgctctcctggcttcttactcagtccatcttctgcttagtatgtgtattcagacagctgtaacatcttatgaagatcttggactctttgcatttggattacctggaaagttggtggtggcaggcaccataataattcagaatattggagctatgtcatcttatcttttaattattaaaacagagcttcctgctgctattgcagaatttttgactggagactatagtagatattggtatcttgatggacaaacactactaataatcatatgtgttggcattgtgttccctcttgcacttcttcccaaaataggctttcttggctacacaagtagtttatcatttttctttatgatgttctttgctcttgtggtaataattaaaaaatggtccatcccttgtcctctgacattaaattatgtagagaaaggcttccagatttcaaatgttacagatgattgtaagccaaagctctttcatttctccaaagagagtgcttatgccttaccaaccatggctttttcatttctctgccatacctcaatattgcccatatactgtgaacttcaaagtccttcaaagaaaagaatgcagaatgttaccaatacagcaattgctttaagttttctcatttattttatatctgcactctttgggtacctcactttttatgacaaagtggagtcagaattactaaaaggttatagtaaatacttatcacatgatgttgttgtcatgactgtgaagttatgcatactatttgctgtgcttttgacagtccctctaatccacttccctgccagaaaagctgtaacaatgatgtttttctccaattttccattctcatggattcgccattttttgatcactctagcactcaatattatcatcgttttacttgcaatatatgttcctgacattagaaatgtatttggtgtagttggtgccagtacatcaacatgtttgatttttatattcccaggactattttatcttaaacttagcagagaggattttctgtcatggaaaaagcttggggttggcgtgcagtggtgtgatctcagctcattgcaacctctgcctcccggactcaagcaatcctcccacctcagcctccagagtagctgagactacaggaagagataccatggagatgtgcacccagaggaaaggccacgcaaggacacagcaagaaggcaactgtttacaagccaagggaagaggcctcaggagaaccaaacgtgtccacaccttgatcttgcacttcccaacctccagaactgtgagcaaataaatgatgttgtttaatc

SEQ ID NO: 3470 - protein, 457 aa, Homo sapiens
MEASWGSFNAERGWYVSVQQPEEAEAEELSPLLSNELHRQRSPGVSFGLSVFNLMNAIMGSGILGLAYVMANTGVFGFSFLLLTVLASYSVHLLLSMCIQTAVTSYEDLGLFAFGLPGKLVVAGTIIIQNIGAMSSYLLIIKTELPAAIAEFLTGDYSRYWYLDGQTLLIIICVGIVFPLALLPKIGFLGYTSSLSFFFMMFFALVVIIKKWSIPCPLTLNYVEKGFQISNVTDDCKPKLFHFSKESAYALPTMAFSFLCHTSILPIYCELQSPSKKRMQNVTNTAIALSFLIYFISALFGYLTFYDKVESELLKGYSKYLSHDVVVMTVKLCILFAVLLTVPLIHFPARKAVTMMFFSNFPFSWIRHFLITLALNIIIVLLAIYVPDIRNVFGVVGASTSTCLIFIFPGLFYLKLSREDFLSWKKLGVGVQWCDLSSLQPLPPGLKQSSHLSLQSS

SEQ ID NO: 3471 - DNA, 1623 bp, Homo sapiens
cggaatgccggaagggccgggctcaaagctccgcctctggcgcgaccgacgactggagcgcagggcaggggtagaggctcgtagatggaactggtagtcagctggagagcagcatggaggcgtcctgggggagcttcaacgctgagcggggctggtatgtctctgtccagcagcctgaagaagcggaggccgaagagttgagtccgttgctaagcaacgaacttcacagacagcgatccccaggtgtttcatttggtttatcagtgtttaatttgatgaatgccatcatgggaagtggcatccttggcttagcttatgttatggctaataccggtgtctttggatttagcttcttgctgctgacagttgctctcctggcttcttactcagtccatcttctgcttagtatgtgtattcagacagctgtaacatcttatgaagatcttggactctttgcatttggattacctggaaagttggtggtggcaggcaccataataattcagaatattggagctatgtcatcttatcttttaattattaaaacagagcttcctgctgctattgcagaatttttgactggagactatagtagatattggtatcttgatggacaaacactactaataatcatatgtgttggcattgtgttccctcttgcacttcttcccaaaataggctttcttggctacacaagtagtttatcatttttctttatgatgttctttgctcttgtaataattaaaaaatggtccatcccttgtcctctgacattaaattatgtagagaaaggcttccagagtgcttatgccttaccaaccatggctttttcatttctctgccatacctcaatattgcccatatactgtgaacttcaaagtccttcaaagaaaagaatgcagaatgttaccaatacagcaattgctttaagttttctcatttattttatatctgcactctttgggtacctcactttttatgacaaagtggagtcagaattactaaaaggttatagtaaatacttatcacatgatgttgttgtcatgactgtgaagttatgcatactatttgctgtgcttttgacagtccctctaatccacttccctgccagaaaagctgtaacaatgatgtttttctccaattttccattctcatggattcgccattttttgatcactctagcactcaatattatcatcgttttacttgcaatatatgttcctgacattagaaatgtatttggtgtagttggtgccagtacatcaacatgtttgatttttatattcccaggactattttatcttaaacttagcagagaggattttctgtcatggaaaaagcttggggcattcgttttgctcatctttggaattttggttgggaattttagtttagcactcatcatttttgattggattaataaataaaagaaatattttcctacttcttacaagaataatatacccctagttgcaagaatgaattattccggaagacaccctggatgaaaaataacattttaataaaaattattaacagaaaagcagaacaaaatggcagtgggtatggggaagtaagagtgtagcagttttaatcaaaaaaagaaacaaactcgaaatgctc

SEQ ID NO: 3472 - protein, 435 aa, Homo sapiens
MEASWGSFNAERGWYVSVQQPEEAEAEELSPLLSNELHRQRSPGVSFGLSVFNLMNAIMGSGILGLAYVMANTGVFGFSFLLLTVLASYSVHLLLSMCIQTAVTSYEDLGLFAFGLPGKLVVAGTIIIQNIGAMSSYLLIIKTELPAAIAEFLTGDYSRYWYLDGQTLLIIICVGIVFPLALLPKIGFLGYTSSLSFFFMMFFALVIIKKWSIPCPLTLNYVEKGFQSAYALPTMAFSFLCHTSILPIYCELQSPSKKRMQNVTNTAIALSFLIYFISALFGYLTFYDKVESELLKGYSKYLSHDVVVMTVKLCILFAVLLTVPLIHFPARKAVTMMFFSNFPFSWIRHFLITLALNIIIVLLAIYVPDIRNVFGVVGASTSTCLIFIFPGLFYLKLSREDFLSWKKLGAFVLLIFGILVGNFSLALIIFDWINK

SEQ ID NO: 3473 - DNA, 1677 bp, Homo sapiens
cggaatgccggaagggccgggctcaaagctccgcctctggcgcgaccgacgactggagcgcagggcaggggtagaggctcgtagatggaactggtagtcagctggagagcagcatggaggcgtcctgggggagcttcaacgctgagcggggctggtatgtctctgtccagcagcctgaagaagcggaggccgaagagttgagtccgttgctaagcaacgaacttcacagacagcgatccccaggtgtttcatttggtttatcagtgtttaatttgatgaatgccatcatgggaagtggcatccttggcttagcttatgttatggctaataccggtgtctttggatttagcttcttgctgctgacagttgctctcctggcttcttactcagtccatcttctgcttagtatgtgtattcagacagctgtaacatcttatgaagatcttggactctttgcatttggattacctggaaagttggtggtggcaggcaccataataattcagaatattggagctatgtcatcttatcttttaattattaaaacagagcttcctgctgctattgcagaatttttgactggagactatagtagatattggtatcttgatggacaaacactactaataatcatatgtgttggcattgtgttccctcttgcacttcttcccaaaataggctttcttggctacacaagtagtttatcatttttctttatgatgttctttgctcttgtaataattaaaaaatggtccatcccttgtcctctgacattaaattatgtagagaaaggcttccagatttcaaatgttacagatgattgtaagccaaagctctttcatttctccaaagagagtgcttatgccttaccaaccatggctttttcatttctctgccatacctcaatattgcccatatactgtgaacttcaaagtccttcaaagaaaagaatgcagaatgttaccaatacagcaattgctttaagttttctcatttattttatatctgcactctttgggtacctcactttttatgacaaagtggagtcagaattactaaaaggttatagtaaatacttatcacatgatgttgttgtcatgactgtgaagttatgcatactatttgctgtgcttttgacagtccctctaatccacttccctgccagaaaagctgtaacaatgatgtttttctccaattttccattctcatggattcgccattttttgatcactctagcactcaatattatcatcgttttacttgcaatatatgttcctgacattagaaatgtatttggtgtagttggtgccagtacatcaacatgtttgatttttatattcccaggactattttatcttaaacttagcagagaggattttctgtcatggaaaaagcttggggcattcgttttgctcatctttggaattttggttgggaattttagtttagcactcatcatttttgattggattaataaataaaagaaatattttcctacttcttacaagaataatatacccctagttgcaagaatgaattattccggaagacaccctggatgaaaaataacattttaataaaaattattaacagaaaagcagaacaaaatggcagtgggtatggggaagtaagagtgtagcagttttaatcaaaaaaagaaacaaactcgaaatgctc

SEQ ID NO: 3474 - protein, 453 aa, Homo sapiens
MEASWGSFNAERGWYVSVQQPEEAEAEELSPLLSNELHRQRSPGVSFGLSVFNLMNAIMGSGILGLAYVMANTGVFGFSFLLLTVLASYSVHLLLSMCIQTAVTSYEDLGLFAFGLPGKLVVAGTIIIQNIGAMSSYLLIIKTELPAAIAEFLTGDYSRYWYLDGQTLLIIICVGIVFPLALLPKIGFLGYTSSLSFFFMMFFALVIIKKWSIPCPLTLNYVEKGFQISNVTDDCKPKLFHFSKESAYALPTMAFSFLCHTSILPIYCELQSPSKKRMQNVTNTAIALSFLIYFISALFGYLTFYDKVESELLKGYSKYLSHDVVVMTVKLCILFAVLLTVPLIHFPARKAVTMMFFSNFPFSWIRHFLITLALNIIIVLLAIYVPDIRNVFGVVGASTSTCLIFIFPGLFYLKLSREDFLSWKKLGAFVLLIFGILVGNFSLALIIFDWINK

SEQ ID NO: 3475 - DNA, 110584 bp, Mus musculus
  misc_feature (1)...(110584): n = A, C, G, or T/U
tgtttgtttgtttgtttgtttgtttcagctgaccgcaagagggtttattgtacacgagctacacttggccacaagagaacagagctagtccaaagtgccaggggtccagggcagagggccagcgggactgttttggttgtaagaaaggcggtcatttctccaggcgatcgcgacgaggtgacgttccaggtctactgaaactcattactgatggcagcacacagtctgatagcttgtcccggccctcagcatccctcacttctgctcctgcaggcgtcgtgggtgcaccactggcttacttggacctctgcctcatctttcttctcttgcgcttcagcctgcgcattctcttcttctgccactcatggcgcaggagtcaaagaagatgacgctaagacctagacacagtttttccccccagtaaataacacactctcggggttcacagtgtgatcaaacagggtattgttatgtagcccaagttgacccttttcatagtccacctgcctctacccaaatactggaattatagatatgcagccagccttttcataagcaaaaaaaaaaaaaatctgtttaattataaatatagccatcatgtatcaaacaacaaaatcacaaaattttcacttgtagatcttaacagactgtgtttttagttttacaactggggtacacttcattccataaaatagagtaagtgctgtgtggagttcagcagaataagctggttttagagacagggaccacctaaaggaagcaggaacaacaaaaggcagacccaccatttaaaaatcctttcatgtcagagaccaggagatggaggagttaaaaaatcactatttaatgttgagttccttgaggatacctgtttctatgtgcacagtttgaggcagagggaacattgttatgctgactgaaacgggcctgtttgtgaaatttggctaaccctttaatcttgttttcttgaaatgttaaacaaatagtttagtcttggattaatgacttgggactttagcccaagtggctccattttgatttttaccagtgaagacacttggtccaaactatgacttaacactgttttgtttcacacatgtgaaatacccaaagagcatgttgcatgtttaagcaccagactaaagagctcaccatttcaaaagtcaaggaagccagtggtgacaatgcccaaagtatgtatgtcacaaaaccacatagccaccctgtatcagtgattgctatggccataattcaatcagctttatctttctcttctcatttattagttagagcagtgacctttggggggggggctggagggattgaggaaggggcttatatgtagcttgggctggcctcaaactcttggcaaaatcctgctgcctcagcctcctgagttgctgatattataagtattcaaaaatacttggttcaaaagtataagggattgctttttttttttttttttttttttttgtttcttcggacagggtttctctgtgtagccctggctgtcttggaactaatacactgtgtagcttaggctgagatcaaactcagagatttacctgcctctgcctcctgagtgccgggattgaaggtgtgaaccaccatcaccccactaagcatactgatcttaaacgagcatttttatggacttccccaaaatgagcatgcctgtgtaattagcacccagatggagaggcaagacagggctgagattgtagctcaatggtaggccacacacttagcatgttcatggcctttaacttgattttaagggtaaaaaaaaaaaaaaaaaaaaaaaaaaaaaagaaaagaaaaagaaaagaaaaagaaaagaaaagaaaaggctggagtggtggcacaacatataatgccagcgtgtgggaagccgaggaaaaagttctaagccagcctgagctacatagtgagatcatgtatcaatattctcatcctcctgaaatctaatcaaaacatcccctgaaggcaactatcatactaaattctaacactataaatgattttttgcctgtctccacacttggtataaataccatttagtcacaatgactccagaacagtaaaaaaaaaaaaaaaatcccaatctaaattaaagagatttttatggcagaaataaactgtcataaagactcatgctgggaactgaattggtgggaagaatttttctggaatctgacagtattgtgtggacaccgggtgagctggtctgcctcttgacctggacattccgaaggacttaaccaccctgattcccagcacagaacttatctcagtcctccttatcacccttgaagaatgctttttatgttgtgcaaacctgcttatcttacctggaacttcacctggcttctgaactgaacccacgttacagatttgcaaatctattctgtacccaaagaaaaccctttccttttatcttagtcttgtttatgattttttgatttacaacaaaacccacagtgtatccattttcatatctggctcttttcagttttgattctatttgtgagatttattcataacttgtttgtttctatctgctggacatgctacgacccattgattcaccccgccactggtggacgttggggttgtccttttgtgttttgttttttctattatgaacaatggtgctttaatcattcttgaacatgtctcttagagaatgcgtgcattcatttctttatttcttgcaataatgcactgtaggcagatgctgctataatcttcagcccacaatagtaagggcatcgttagattcttgctatcctaagagttatagcttctggagtagtgcttgaggccctctggtttgaagaagtgcttgtgttcatggtttgtttgtctgtgccataagaatcgttcctgctgtcctggtctgggtgctggagtctatgggtatactctgtttaaggagagggtttgagaattctgtcaggaggctggtaggctgtggccagtattttcattaccactagaggtctcctcatcttccatgttaatttaggatctaactttattgggagacagaggccaatagacccaacatcaaacatctcctgcccggtctgtggacccgcctttccagttatatgtaaggtgttgaaggtctggctgacttctccttgggtaatccacctgctccccaccccattcactctattggcatagctggtgagtttggctaatcctgggccacctgtgctgggtccacctcctccgccatccatctctgttcattcacatctgtggatacaagtattggaaaccattgaatatcttgtcttgttgggtgtatatatttgatgtttcagatggagatgtttcacaatgcatgccgagctgaataataggttttgccagtttcccctgtaaatacttccaccctaatttgaagctgtcagtgtgacacttgttgtatgtgggcttggcatgagatgccataatagtactgtattagcgttcccaacacacagatagagcaaaggtagataaagcagagagaaaaagtacagtgtgattaaaaagtgatattttgagtatcacaccaacatcacattttattaaactttctgtatagagttaattttgtttaacaaaaaaacttgaaatttgatttttttatatttttattttttcactttgggagatcacacataggacactgcgcatgcgatccctctgcgaggcagctgtcagagtctcccaaccctgacaatctgaaggaggagactattccattccttcattcactggcacctcaaaacctgctgaaccaatcctacagccctctcttcttttcattaagtcacaggaaaatgaaccatcaggaaacctggaggaggaagagtcacccaggacagttgtgtcataagaccgagagcagtgtgggtgaggtctgtgggatggctatagctcaggcaagcagctaccccctgtcccctcctccttccaggctggctatctcccagagttcctgcccagctcttgggctgggcaatctggttggccagcctgggtgtgtgcctgtgacaggaactggcatttttctcccacctgggccacctggggacatagcagatggcctctcatctttgaatccttgttgccctttcctacctggctctctcctctctctcttacatggtctcattgtgcagcccaggctggtggatgcctccttccttccttccttccttcnnnnnnnnnnnnnnnnnnnnccctccctcccttctctctctctctctctctctctctctctctctctctctctctatatatatatatatatatatatatatatatatatatatatatgaatacactgtagctgttatcagacacaccagcacaccagaagagggcatcagatagttacagatgattgtgagctaccatgtggtcactgggaattgaactcaggacctctgggagagcggtgggtgctcttaaccactgagccctctctccagccccatgatggatgctttctatcttgactttctcttgcttgaaaaaatgggtccaacacctttacctagattaccagatctgtgttggaaataaaaaaaaagtggttacgagttttagtgcctcaaaaaattaggggtgggcgtggtccacaccaaatggccaggcagactcaggtgcacattttctctctttttaacattttaatgttattgattgattgagacagagtttctctttgtagtcccatctgtcctggaacttcctgtatagaccaggctggcttcaaactaaaaaaagatccacctgcctcttcctcctgggtgctgggattagaggtatgggccaccatgcccaaccagtgcacatattctaaggctaggggcagggtagggatgcacagggcattgctctagggtctgtgacttgaaccgtgaactcttcaaagccctatctgactggtgtctgcagagattcgataccatgtctgattctcacaggttcccatccagcttagcactcccacccccatacccaaagcttcctcctttggttgggatcttgtccttcagctcaggctggtggagccacacggcccacccataggcacttctgctttctttagctactgaatacatccgattcccttggcctcgagtaggtttcttttcttggactgtgaaggctaccctaggcattttgagatgaaacatgaaacagaacctaaggcctgtgcgaatgaaatgagccagttatctgcccctttccttagcttcctaggtcatgactcttcattttatgggaatgctgcatggatatagagagctgctgtgtaaagaagccttttgagggagatgagcagatacacaaggaccatcctttgctaggggtaccagaggctacatgcttttttttttttttttttttttaaagaacaacctttggaacagagaaacaagaacaaattctggttttgcaacatacctacatacctgctacgtggtttttgttaggttgaaacctctccgtgatgttgatgacattgacttggaagattgttaccggaattagaagtcacagggataaacttcctaccaagtaagtacctggcacatagtaggtgccctataaatagtggctatcattacagctgttagatgtcagaaccatagcaacaatgatgctacacacttattctgagccccacttccccctctcccaaagagctaagcttcgctgtggctgcctgcaaggtgttaaggcccacacactcatggctgggttctcaggaaagaaagaaatacctggcctctgggcttttttctgaggaactgaacaattcacctgctttgctcaagagtgccctaactacagggctgggagtaccacctgacaggaatccccttcaccactgacaacagcaatggttgacttttccacctctctctggggttagcccagcctctctggcagagataataggttgcctagatagtggaggattacaatttgctttggagaccacgggtgtagctcagaggtagtcagcatgtcttagcatgcttatgagccctggcttccatccttaccgaagtgtcttttggggggtccaaaaaaatgctctaaaattgactgttggtagtggttatactatactgtaaatatattttaagaagatctaattgtatatgttaaatggacatttaagttgtgaatgggctgatgagttgtctagcaaaataaagttgctacattaaaatatattttaagattttaaaatggatatttatatatctgtttatttagtgtgtgtgtgtgtgtgtgtgtgtgtgtgtgtgtatctctaccaccatacacaggtggaagtcagagaaaattttgagaaagtgttttcttcttcctccatatgtgtccagaagaccaaactcaggtcatcaggcttgatagccagtacctttcctggacgatctgtaaaactgacaggataggataacatattagtcctatctctcaggaagtagttgtgaagattttcagttcaaggctagcctggactacatagactctgcttcaaaccaaaaccaaaaccaatgcaggagaccaaggatatggctcagaggtgaattgcttgccagcatgcagaaagacctgggtttggagtcaggcagtagtggagcagactctggggggaggggtggagacagacaggtcaaacagatatgtgtgtgtgtgtgttcaaggccaccctggtctacagagtgagttccaggacagccaggctacacagagaaactctatcttagggggagaaagaaaaccacaacaacaacaacccccccnnnnnnnnnnnnnnnnnnnncccccccgaaaagcctaggtttgatttcctagagctataaaaaaataaaaaggctctttttaaaataaatgtttctcatgcatttacgactcttgtaaacccaaattattcttaattattcctttgcaattatatatatatatgtatgtatatatatacatacatatatatatatatatatattatactttgatcatgtttcccagctccatcatccttcttatccccagccaccaaacccctttcttcttatcatcaagtctctctcctactttcatgactatcttgggggtcctatttcatttaaccggggttgcttgtgtgagcgggtggggacataagatcattcttaacctccatcttgggatatccacaaaaacccaaacccaaaccaaaccacaacaagcacttactctaagccagggagaaccatcctcatttggcaggagagcagagcaaggcaggatataagatctatagggagtattggaagtatgctaggaggggtaagagggaaggaaaaggttggagagcccgtactggccagagagaagagggctagacctgatccccatcctggcaatataaaagcaaagggaaaaaagtgaggacgtaaagataaagcagagccttccagagggacgcgagaggcacagccagtgaggaagggtggatgggaaaggacactccaggtaggggagcagatggtgaggtctcagaggtgtggcaggtggtagcttgttagagatgtgccagcagggtggggaggcttaggtgtcggtttttcagcggggtgatgtgattggattcctgccagactgctggagagccccggacacagtccgggctggaggactttgttcccagttgctgaactctggtaggtggtgagtaatgatatgggttgacatcgtgagatgcggcaagtgttccatgaagttccctgttagtggccaaactgccacgcacggctggagactcagctgtcctttcagaagacatgatctgtctgtatacccactttcttcctttgctttcttttttttcacccatccttctgtttggtggggctcgggctcttctttaccctttccctgtttcttttctcttgtctcttgggtcttcctgccaggaccacaagttttagtaagctatgctacggtcctgcagtatttctcatcttttcttttgctgagacaggatcttgctttgtagctgaagctagccttgtatttggaatcctcctgcctcaacctctttccctaatgccggaattacaggctgtccagatcctgccaggctgatgtttttcaacccccttaatggtctgggcaggtgcagctccctcagactgggtaagtaggcaggatgccaggtgtctatttttcagaggaagaaaggaaaaagaagggaatacatcaggggtttctcctaggcccacagggagaggggggagctttctaaagtggtcctctgcctgtgatttgggaccctgaaaggggttgaaccggaccctttctttcacagggggcacctaagacatcaaaaaatacagatgtttacattacgattcataatactaccacaattatagttatgaagtagcaacaaaaaatagttttatggttgggagttttgtcataacatgaggaactgtattaaggggatcacagcattaaggctgagagaaccactgctctaagggatgggtgtgttgttgtggcagtaattcacagcacctttattggaagctttctaggtgaaaggccctgaggtgtaactttgttcaaagggtatctggcagaaaaggaagaagaagaagaagaagaaaaagaagaagaggaggaggaggaggaggaggaggaagaggggaannnnnnnnnnnnnnnnnnnnnnnnnnnnnnnnnnnnnnnnnnnnnnnnnnnnnnnnnnnnnnnnnnnnnnnnnnnnnnnnnnnnnnnnnnnnnnnnnnnnnnnnnnnnnnnnnnnnnnnnnnnnnnnnnnnnnnnnnnnnnnnnnnnnnnnnnnnnnnnnnnnnnnnnnnnnnnnnnnnnnnnnnnnnnnnnnnnnnnnnnnnnnnnnnnnnnnnnnnnnnnnnnnnnnnnnnnnnnnnnnnnnnnnnnnnnnnnnnnnnnnnnnnnnnnnnnnnnnnnnnnnnnnnnnnnnnnnnnnnnnnnnnnnnnnnnnnnnnnnnnnnnnnnnnnnnnnnnnnnnnnnnnnnnnnnnnnnnnnnnnnnnnnnnnnnnnnnnnnnnnnnnnnnnnnnnnnnnnnnnnnnnnnnnnnnnnnnnnnnnnnnnnnnnnnnnnnnnnnnnnnnnnnnnnnnnnnnnnnnnnnnnnnnnnnnctgggcatggtggggcacacctttaatcccagcacttgggaggcagaggcagtcggatctctgagttcgaggtcagcctggtctacagagtgagttccaggacaaccaaggctacacagagaaaccctgtctcgaaataaataaataaataaataaataaataaataaataaatagaaataaaaagaaagaaagaaaaaaaaaagaaaaggctaacaggccttcttaatttatgagtcactgattttcaaggagtgcttcaacatttattgagcacctctaagacaggccaagtacctagtaccaagtacctaggcacaaagagatagttcctactgtcatatggccacccctctgtagtgagagtcactgttaaatggatgcagctgaccagtgctcaatttgctcacctaagacgcgcttgaaagcaattcaaggaggctcagaagcagagcaaaaagctaggggccaagcctgcagctctaggttccccaggcctcgctggaatgtcagtttcctccatttaagatctgccaggtgtttttgagtgcgcagaaatagcactcagggacacccattaaaaagattcctgaagcccaccccagcgttatagaatcagaatggcctgatctacatttccacccccacctaaccccctcgggacacttttgagatagttaagttacacaccctaacctagagtacagcttaatagggagataataacctgctttgaagataggtcaggcaagcgattcaagacctaaatgggcgacgtgtgtagaagaggctcttaaacaacagtatacttccttgcaaatgacagtaattaaaacatccaaataataaccaaacaataacagtaaaagaaccggagggccctctaggaaggtggcttaactagagtattacagccagagcagttcgagtgactgtctctttaaggttccctccccccgccgccaggggcgtgtcagacaaggtcagaggcgcgtgcgcgtgactcctcggggcggtcgcagcggcgcgacgcctgcgcttgttgcgtgcgtgcctgaccccgcccaggcctcgtccctgccctgccccctctgcggggcctcccccgcccgcgtcgtacagctgggccagtgacgctggcgcagccgtcgccaccgccgccgcgttccatcctcaggagccggccaccgctcgcgtcctcgtcctcgtcctcctccttcgtcagcgcccggccgcgtgagccagaccagggcacgcgaggcgtcgcgggggacccgacagggagtgcaggcaggcgggcgcgctcagcggcggagcgggttcggcgacgcgggagctgctagcgccccctttcccggaggtctcggcgccgctcccgggtgagttgtcaccgccgcccgggctggaggggccggctttgtgtcagcggcgcgcggggccggttgtcagggcactggcgggcaagcacttcctcagggacgcgggccttctgcgcggccgcctgctaccgcgccggccggtgtcagcactgcgagccgcgcgggagtagccgggtcgggccgctccgagggcggcggcgtggttgtgccggtgcccgagagcggagagcagatcgggctcggtggagcgcgctgcaaggcggaggccctccagtccagcgaagccgcggttccgcacggcgggaccggcttggccgaggtgggtttcctgaggaaaccttgcagccgctcgcctgtgcgcgggagcgttctggagccccagcgcctggtcgcctcttcagtcgcaaaaacttttcttattatgtgggctgaaacttgccgaacccatttcctgttttgtttcggttttactgtaactacatatagactttcttacttgtgagactgatggtccctcccgggacagccaccatggtggaaaaacttacctgtaacggaattgggagggcagcaaggccggggatcccaaagaggcattaagttcattgggaactttacattagttcagcagaggcccaatgttgttgccacacacttctttggtgacaaggtagtgtgctgccctttgttgctcttgttggttggggttcgaagagaggtgcggggacattatccttttcagttaagccatgggtatttagtcctttctagatctgcaagatccgcagtgactttccacttttcactggtcaatcggtttttggtgttagaatccctttggttaataataataataataaaatcacacatacacacacacacacacacacacacacacacacacacacttttgtgctctgggaattctacacccaggctgtcaccatctagtggagactagtagagacatgcccttggctttgacttcttagttttctgagctttgcatttttcattagatgcacattcaagtagaaatgagaactgtcttgagttgggggtgggagtggattcctgtatttcaataaaggaatcacttcataaggtggtgatactgtggaaaacttgttgagggtttattgtgtcccaagctaaattcatttagcgtgtgtgagtttgagtgtgtgaacttgtgctggtgtggaggtcaaagaacaaactgcaggagccagttttctacctcccagcaattgaactctggtgatcacgtctggtgcttctccactctgagctatcacactggcccaagtttcacttttgatctcatgtaataatatttgaggtagggccgatattatccttattttttcagttgagatgaaagttacacatgttaaataatgtaagccacaaatgtaagttctggagtgtctagattcttctcaaaacaccactgtttgaggctctttctctgatgataagcatccctaacttgctcctggaagcccagtaatggtaggttgcacaatactagttcacttttttttttaaatttcatatcatacacagcatatgccagtcgttacctggttttatagatactgggatgattaaaactgaaaccagacagattttcatggtgctcaacttttaatttagtttattttgatttatggtgttagttttcattactgtttgctgctttttgtttgttttttgttttttcgaaacagggtttctctgtatagccctggctgtcctggaactcactttgtagaccaggctggcctcaaactcagaaatccgcctacctctgcctcccgagtgctgagattaaaggtgtgagccaccatgcctggctcactgtttgctgcttaaggaactttgtacccattaagtttaaaaggaagaacagttatcagttcgagactgaccctgtagatgggattcctgtctacagagggactctggatattgtagtaggaatgagagaggaaaaaaatcctcaccttctgctatagaaaaggctcagggtatgcagtcctgagagcaagcccaccaggtgtcagtttgacttgttgagtccagcttctccagagccagcattcaagctcactgaaaagagaaagccaggtaaaaaggtcctgcagcctggtaggtggcaagacctcagcactctgtggtttcctgcccggtctccatggtgtggcgattgaactggagcacttatgtaatgatgcatcttctgacaggggatttcctcctctactgtgtctggggcctcggttcctgcttcactgcttcctacacacacacacacacacacacacacacacacacacacacacacgagaacacgtgccctccaaaggtactaattcacttggcttctaaaagtaagactttttacaagtttattattactagtaagcattattttacacacattatgtttgtccatttctcacattaaaacttgcttttggttgtgcatgtctgtaatcagtattggggagacctgaggtagggtcatgacttccagccagcctgggtacacatacagtgaaaccctgtgccaaaatcagatgacaaaaaaaccaaaaacaaagaaaccaaaaaacccccaacaaccaaaagacacccttgaccaccaaaacatcctttactctcatatttctcctgtgctttttttctgtatttttagctctcttgacacctgctcactactggtatcctctgtaggcttagagaaacaataaagtatcttaaaatttcagttagggagctgtggagatggcttagtgattgagtgcttgctgttcaatgtccaaattccgaggactggaatttgttttttagcacccagccagttcacagccattcataacttcacagttttagggtacttgatgcccttttctgggctgaatgcacacagacacctgtgcataatcattaaaatcttaaaatatttgttgagactgggcatggtggcagatgcctttattccagcattgggaggcagaggcagagttcaaggccagtttgaacatagtgagttctaggacagccagtactaaaaagtgagaccttgtgtaaaaaccaagagaaaagttaaagattcaccggggaacatgattttcctcatttcagtaccaaccaggtgatttgggagaataaagtagaacctctgctggcagtgaaggaaagccaaagaacacggtgggtgcttgcttgtgttttaccttgctttcccctttaccaagtgatagttcatgagaggaagtggtggtccagatagcccactgtctgccacacataaaacattttactgagctcttggattggcatgtgatctagttggagctgatgaacaaaattcattttccttcctctatctgccttgaactcatgggattcctgctgggaacattctctcaagtagtaggagaatggaggaaaaaagtgataaaggaaacacacacacacactttaaaagcaagaattgctgtgttgcagagttgaatgtgaagattatgatatttgggttaagggcaaacattgaaacaaaatatgtgacaagaaattcttttggtttctttgaagattctatctatgccgagatcactctcagtctcagtccattttctgttattgtaacaaaaaaacctgagatgtggtaaatcattaagaagggaagcttagctgggcggtggcgcatgcctttaatcccagcacttgggaggcagaggcaggcagatttctgagttcgaggccagcctggtctacagcagattgagttccaggacagccaaggctacacagaggaaaacctgtctcgaaaaaaaaaaaaaagaagggaagcttatttggctcacagcaagttgaagagcttggcaccagtgtcttacatcataacatggcacagggtatcacatggtaaaatcttggcaactgctaatgtatccatccaccttctagtcctacctccaaatagaatatgaatacatgaatttgaggattttctaatacctggacttttaggacaggttcaaaccatggagtgaagaggaaggaggaccttaaattcaaggtttgcttgtgctacttagtgagtccttgtttccaaaacaaacaaaaagccaatcaaagccagaatatctacatatgtaataacattgagtcttcacctagttgaatggtttttagaaaattcatgctcataggtatatgagcacattgtaggatgcttaaaaaagttaaagcagtgacaaatactgtggtttatgtgggaggcggtagcttgctgatgggaaggaagaatgcagattaggatcttgagacccaggaagcagtcaggcaaaacttgaggtggcagaccttggatatgaaaatctattttctacatcatggctaagattcaagtaagtagaaattgtttctttggttgatgtatgctctggagtgttaccctgtaaaaagtcttttatgtgagaaaggagtctggcaggcacctgtcatcttccagcctcgtatctgtgcttgtctgccccctttaatcttgggggtgggagctggaaaccagctggaaacctttgctcttttgtcttctggttctcagctgagtctagaggtctccagaatctgatagatctggaagtagtgttgagctgggttgctgttgctctgaaaggctagctgctactcccaaggtggagggacagttgagtctgtgaaggtactgggtttaagagtagcagggagtacagcagttgcagtgagaactgagtggggtttcagactcttgtgttatctatgatgtgtctcccttgccaaaaattcatgaagtacttccaaaacaggatcttagtgaagcattctcaagcagaaacagatacacttgcttgttaatgtgaccagtgttgagagagctctaaaattacctggtagctgtgtgccctgatacaccccctccagagtagcagttggtacaagtgttttgtttttactttttgtgacttgggaaattagcctgggattcttcatgacagcagcagagtcagtgcttgtgcagacggacagttctttattacttggctcttttatgttgaaaagaaaatagttgaggattcttttttcctctagttggagagtaggagcaaaacctcaagagaagagatttgaatagggactcttccaaacttccttttcctaccaacttttctccaggagggacatgtatctcatctgcccaaatccaaattaccaccagcagtgacatgcctgtgtatccacagaagtttaagattagagtggagttatctttttttttgtttttgtttttcgagacaggttttcctctgtgtagccctggctgtcctggaactcactctgctgtagaccaggctggcctcaaactcagaaattcgcctgcctctgcctcccaagtgctgggattaaaggcgtgcaccaccactgcctggcagagtttcctctagactttgctgaagttctctttggctgagctaggttttgacttttgattaggctatgaatgagagtgccttctgggcattccgttagtccagttcttctctgggctgctctctgaagatctctgagaacttagtggatggaattctgaaaaagggaaccaagaaagtgggttgcttattttcatcttaaattgtaattgtctctgcagactgcttgagggaagattgaggggtattttttctttaattgccattaaagtgagagaagattgcagacagattagaatatacaagtcaaaataaaataattattgtggggctggtgagatggctcagtgggtaagagcactgactgcttttctgaaggtcctgagttcaaattccagcaaccacatggtggttcacaaccacccataatgagatctgatgccctcttctggtgcgtctggagcaagtagggcaaccagagtaagcagaggtcctaaaaattcaatccccaacaaccacatgaaggctcacaaccatgcgttcagttacagtgtacccatatacattcaataaataaataaataaataaataaataaataaatattgtgtaacctaacttatcttttctgtgtattctgtatattctgtttcttccgtcttttctggtataccctaaacatcttgttttgaattttgttttttttttcccagcattattccataagcattttcctatgactcatccttaatagatcaaatggcttcatatggtaatatatatatatatatgtatatatacacacacacacacacacacacacacacacacacacacatatatatatataagtttactcagggagattttttttggcatttagcattttactttgtcaataatgcctttttaaagaaatagttttgttggcttataatttgtatatcataaaaattcacctatgtggtttcttttacttagcatgcttttgaggtttgagcatgtatctgtgctttattctgtttattactgaataatatttctttgtatagatgtaccatttttaaattttttcttattttttgagacaagggcccactatgtagctcaggctgtcctggaaatcagtatatagaccaggctggccttgaattcacagagctctatctgcctctgcttcctgagtgctgggattaaaggtgtatgccaccatacccagtctatacattaattgatagatatttgcataaacaatgcagctgtttttagtatatttgcggggttgaataagatcacaccaatccaattttagactattctcacctactttgtttgtatgcttacctactcagacatttcgtggtattgtaattgtgatatgtatatgtagtctttagtaactggcttctttcacttccagttacttttttttttctttttaatgtgtgtgggtgtttttgcctgtgtactgtgttcatacagtactcccagaggccagaagatggtgttatatctcctggggctggagttacaatcaattgtgggctaccttgtgggtgatgggaatagaactagagtcctctggaagaacaactgatgttcttaactgctgagctgtctctccagccccatttactattgttaagatttattgcttttggagcatttgctggcttcagtcccagtttatttatttcctttataccttacttatcagctgatagatatttgcattgctttccttttgggttttgaacaatgttgccaagaacattgtttgtttctttgtttttgttttgtttgttttaaatacagtcatgtattctagtctggctttgaggtggtcctgcttcaacctcccaagtgctgggattatagccatgtgacaccacagtcaactaaaaacatttttgtgtaagtttttgtgtggatgtgtgttttcatttcttggggcttttcattattaaatgtgatctgtagttctcagaagtttttcctttccttgtaaaaattgtcctgcagttctgtgtacctgctggggagaaaaacctcaagataggggaagatggctatgagagaatgtacaaatctgaggaactgagctctttagagcagctttcactgccctcagacaggtggactggctacagctgagttcaggctagacaccagaaggagcagatggtgctgctgagagtgtcatttcctctatgggatttaatctgagcatttacatcaaaccagccaccttactggaataatgtaatggcttctctctcctttcacccttgtcctaattggaactagccttcattatcaacagcaggttttgctcttcttgtttctagatcattataaaaagctcttgaaactgcacacttacaggtcaccttgttgttttatcagagtgtcaagacagtttctttctagagaaacagagggaagacaaaatggggtacttcagttagccatctcttggttcctgtatctggaaccaagccaaagtgagtcctggaaagttctttagatgtgtgtgtataaatatttatgactatagctatctataacttacctggtagagttcattgactaaaatgttgggatttgaagtaggtcctattgttaatacaaattctatttccaaattctagagtttcaagaggcccaatgaggagtcaaattatttttaatttgattttttttttttgagacaaagtatttatttctagctgtcgggaactcactatgtaaattaggctggcctagaattctcagagattcacttgtctatttttttaaagatttatttatttattttatgtatatgagtgctctattttcatgaacatcaacagtgggaatcagattctgttatagatggttgtgagccattatgtggttgctgggaattgaggttaggaacctctggaagagcaaccaaagcacttaaatctctgagccatctcttcagcccccgcctatctttctttttctctctctctccttccttccttccttccttccttccttccttccttcnnnnnnnnnnnnnnnnnnnncctccctccctccctccctccttccttccttccttccttccttccttccttcttgtttggtttgttgttgttccaaacagggtttctctgtgtaacagctctggctgtcctggaattggctttgtagaccaggttggtcttgaactcacagaaatgcccctgcatgggcctcccgagtgctgggattaaagatgtgcatcaccatgcctggcctcccacctgcctttttaatctacctgcactgttgggattaaaggtgtgtgccaccacaccggcatacaatttttgtctgtagataggtttctggattccatctgattcttgtgcaacaaacaagtatatgaagagaaactgtaggttcattaaagttgaaagacttggactttgaattctgagatcctctttacctcttatagaaaagagaaatgagaactggaggcttaaggatcagtaaagaagccaagttcccacctcagtaagatcaccttgtctctttgttcttgctctccttgggcccctgtttacaaagtatattgggttctcagccaggtttctgattcattattttgttttgtcctgaataaacttatgtttttccatggtatgttgttgttttgagacaggatatgcttatggtactagggataaaacccagggcttcatgaatgccgacaaacattctatcatctgaactaccctagcatctgcagtagtgagcaacaaagggggatgtgtctttacagtgtttgaaggaatactttaaaaaagagaacatttttatctgtgtgaggaatactttaaaaaagacaatttttatttatttatttgtgcatgcttgcgtgcatgagtgcgtgtgcacacatgtagcgtgcttacttgagtgcaggcacccatagaggccagaaagggatgttggaatctctggccctggattacaggtggttgtgagccatccaatgtggttgctggggatcattctctggtgctctgcaagagcagtacacactcttaactcctgagtcatctctccagccctagggaatacttttcttaaaatgggtagagttgcatgacaactaggcttcttaacttttttccccctctgtgctgtgccttcttccttccttccttccttccttcctttctttctttctttctttctttctttctttctttctttctttctttctttctttcttttttcttttttctttttttttttccctatgattcaaaaatgtctcttgactccaggctactggattgtctcctgttgttttattttccttaggtcatccaggtgagacagtggcaggtgctgttagcatcctagatatggtggaattacttgaagactgggagacagtagtcatctgatgaatcctataccctctcctctttattacctgttttgtctccccaccctaatcccttcctcctgttatctgacaaccccttcatagctgtgggtttgacttccttgggcttactgtatatgcagtcagtcatccacttaaaggcaatgtgaacacacatctgaaactgtatgtctctagtcagttaggaaagaaacagctcatatattttcatttttccctatccctgaaagctagtgaacaatgttttgtatttggtgggtgctgttgttttggttggtgttctgacagcatttttagaccattagtgaatgatatgctggctggttatttctcatcctcctttaggtatgccatctgctgtaggaaggccaccttcctccttgtttactcctatgggggattttgcttgttacacagcagtatagcaagaaaaacaggctccgggtttcataaaaattcattgactcatcttttttcctgtttacgtgtaccctcaagttaggataatttatgaatggataatcagcttgggactggtaagaggcaggtatagttactgcagaaaccaagaagtaaatcttggtatttatttggcatgtagtgaatacatggttggatacattatatacattttgtttatttgttttgagacagggtctcactgtgtagctactatgtagccctggccattctggagttcactgtgtagaccaagctggccttaaactcacagagaccctccagcctctgcctccaaagtgctggggttaaaaatatactccactatgcctggcttgtttctgttttctttcttttttgtttttgttgttttgttttgttttttgagacagggtttctctgtgtaaccttgcctgtcctggaactccctctgtagaccagtgctggaattgaaggcaaatgccaccactgcctggctttgattgcttttttttctttgttgttgttttgttttgttttgttttgtttttatttttgagacagggtctcactatatagctcattcagcaagggcaatcaaaacaaactttagggggctggagagatggcttatcagttaagcgtactggctgatcttccagaggacctgagttagattcacagcacctacctggtggctcataaccatctgtaactccagtccgatgggtctaaaatcctcttctaacctctgcgggcaccaggcacatacaatcatgggactaaaactatcaatcctgccctaaaactaatgtatacatttgtttttgcagcttggaggaataaatatatccagcatagagtgtgaattcagttgtagataaggaaatagctaatacggggtgacttgtttctttgttctttagaaatgaataattttgttggtgcttctcattatcccatgaatgcttgtctaaaagtacatgtttatttttaggaatataggtagagagtggtagcatgagcagatgtcagagccattggtggcagctttagggatgatatagagagggtggtgcaaaggtgacaaggaattttttaagtaatgtgtttaaactcatgtgttaattatacaagaatttattaagtgccctctcccagattctttgcagcacattttaacacttaaagatgcattatttgagttgttcgctagtgttctagttagtcttttcttacacatttcaaaccccttcaatgtgctttaaatttctcctctttacagtatgtgctagacatctatattaacatatatagcagcaaaacaggcaaaaatttctgcattttacaggttctcacataagacatttcatataaaatatatgtgccctccctaatcttgggggttcttcgtctgtggattcaggtaaccttgcactgacagtttggagggagggaaaaaaatgtatctgcattggccaacatgtagacttttttcttgtaactctaaacaatacagcctgacaattatttgcacagcattaggacttacaagtaatctagagatgatttaatgtatataagaaggtatttgtaagtaactactgtgctgtttttaaataaggtacttgaatatcctcagattttggtatccacgggtgtcttggaaccaataatctttgactaccaaggaatagctgtacttaaattttagttctggtatacaaatgggaaaagtaaaacctttgacaatgagttgacattttttaaaaatattttatgtgtatgagtattttacctacatgtgtatatatatgtgtcacatgtatgtgttgggccctcagagatataaagagggcattggattcccctggaactggagggaaattaaagatggttgtaagctgccatgtggttcctgggaatcaaacctaggtcatcttctgtaagagcagcagtattcataacccttgaccatctctccaccccacccccttccctgaaggcattccgcagctactgtactgagctcatgctgggaaatggaaacttccagggattttagatccataacacttacttgctgagtaacagccgtgtaatagcagtatctcctttgttgttccccttgctcagcacagaagtcctaaactcagtatgttttttatactgatgggacaaaaattcaaatatgaggactgggaggtggcccaacatgttggacagttcaaaactgcttgtaatttcagctctagggtgatctagcactgatactcaggcatgtacatacctgtgccccatccccaacacaaacacagcacacagataaacactaaaaatggtgaaaataaaatttaaaattgtgaatatgtgtatagtttgaaaaagcagctgtaatatccttaggaagagtgtttccatataatataaaggttttatttttatttttatttttttggaggaggaggaaagtccccagagacagaaatactgtctcaaaatctatgtggttgacagatcaaataggaataaaacaaagcagaaattctgagcttattggttccaaacactttttgagtggctcagcaagctcaccccaattaggtatgttgatcccttggttctaactgtccctttgcagtcatctgattgactcctcagcctggtggtgtttccaagcttgagggcttttgaagatacttccttccctttgatgttaccagaaggaaatcagcttggtctctgatgataaactattgtcctattgtttccagagatgagactgtgcaaggacattatagaagaataatattctaggtcgtggcagcctagaatagaaaagaatatggagtgccagcgttcttggaccagagatgtaattgggcagcctgcctgctttttccatttagttgggaaagtggaggagtaaaactggccatgggccaggcgcattttccctattcctctgtcctttgagaatgacagttgttttagaagagagtccttaggaggaggcagcagagaagctagtaggcttagagcaaccttgcttcagtctcagcttttctgcttcccagctatatgacctggaacaaattgaactttgattttcagggtttttaacatttgtttagatgaggtctcactatgtagtagcccgcccaggctagtctcaaactcttggcattcttcctgccttagctttcctaattctgaggttataggcattcatccctatgcctagctgatccttcagttttgtggttagttttgaaataaaaccaatgttaatgtgatctctagaaaggtaccttattaacatattaatgattacctagggagagaactctaggtcataaagataagagaaacaataatttaatcttccttttttctctctctttttgagacaagtctctctgtgtgtaactctgacactcttagaatttgctgtatagatgaggctggcctcaaactcacaaagcttgcctttacctccagagggatgggattaaaagcatgtaccaccattcttggctaaactataactttttttgtttgtttttgttttttgagacagggtttctctgtgtagccctggctgtcctagaactcactctgtagaccaggctggcctcgaactcagcaatctgcctgcctctgcctcccaaatgctgggattaaaggcatgcgccaccactgccctggaaactaacttcttaaactacttttctgtgttacttggattttatactagtggtatgtataacttgaataacgtattaaaaccacatttaataaaattgatatgagaatcaaaaggacatatttaaagcagaaggcacagtcctgataactaaaagatattcgaatagcagtttgggaaagatatgataaaagtaacgggcccttgctgtcttagtgttagttttctgagtacatagctatgggtaagtctttttgctaagcctcagcttcttcaactgaaagtagaagttaacaattgcatgtactgtaggctgtgggttttgagggttatatgaagtgagaaatgtaaagtgcctagaccggtatctagcacgtgggaagttttcagctaataatgttggtgttgccagctcttattctcatgcttatgggttaaagcaaggtgggaattacactttaaagttactgaagtgagacacagaatgaataggtgactgcctcccttcttcacattctccctctctatttttcctcctcctcttttcttttttctctacccccccctttccttttcttttatgctaggaccttgttacatagccaccacacctagcatcatgctaagggggcttgggttacagcagaaatagcattgatacctatgtgattggtgtctgaaaacacctgctctatcagtgtagcctctagcaaacgggaggtgtctgctcagtagtggccaggactgtggacagtgccatagcagagcaccattggtctgtcctgaggagttaacatgactcaagtttggtcaattttggatcctatttttttcccccactttctgtggcagatgggccacagaattacagaagggtagggcttgtttccctctcctcatttccacatctactttatttggtacatatcaggctatcattgtctttgtttgtagctcaagtttctgacctgtcaagttcagaacattccagtttatccttcgctgaagttgttcttgctgctgcaggccacactactgacttgtgcttacattcatttttttctttgttccaacaggcctgcataggacaggttgagcttctctagtggaagacctttctttgaatcccgtgattatctgtatattgttggggactgtaaagttttaaggggctacccttgaggtacccactttttcatactcgaggctatccaggtttctgtacctctttagacaagtatccttttgtcttggatctaggaggatgttaaaacctcatgaaggagaacctcttaactggtagctaatttcaaaataagaattgtctgtggagaagcaccctcttacctctttgttgaaagtccctttaaagcataagctgcttaggatttgtattaatttttctctagtattgatccgggttttgaagatagtttgtttttaagggtgatgactaaaaattttggacaaagttcttataaaagaactaggttgtgggtttatttcaagggcaatcatgggtttgcagagcagcatcagggcactaggaagagacctgacatgctgttttggagctgtcatcaaggatgccaccttttgggaatcaaattataggcagtccttgatctctgaaaactcatgtctgggtcttatcagaattaactaagtggggaccagtaagatggtttgtaagtaaggtgcttgccacctgagtgcaatccctggaaccctcttaaaggtggaaagagggaactgagtcacattgattgtccttggatatccacattcatgtcccctcttacaaataaataaataaataaataaataaacattaaaacttttttttttttaaagaaatgaaccagattgtttttctaacaaaaatgactgataaaattagtctgtaaatgtgggattgtgggactctcttgtgcgtggagctttggtcatatgtgacagatctgttcttatcatatagaggcttaatgactcttcatttctatcccttctaattactatcttttcccaaataggtcatttgtgggaggcaggtgcaaagtgaccagaaggttgctttaggagtacagagataacgttacagagtgaagtcactcttttaggctgactttgggattttcaaaggtataataccttgagtgattatatctaagtagtggagtaaaggaggaagggaagtcccctggggagtaggacagggcagggtgtgttgggtggcactgtgctgggtgttttatttaggcaagcttgtttcactttatagatcaggatagaagccttagcaatatggaatactgtaattgactgtgctggagctagaaccagatttgcagtgatttcagagctggtgtttctttcatggtagacagagtctgtgggataggaatattgaagtgcgggatgagctggagagggagacaattatctgggggggggcggagagggtagaggtaggatcaaataagggtgtttggaattggatttagatgaagtgaatgggaaggaaagaccaacaaaaccagactaaagtagaaaaagagaagttggggtgtatttcttggggtgaatgtgtactattggaggatagttctcgtctgagggatgttccctagggtttgcttgaggcataaaggaccagatagggaagggcagttaagcccctaccgaaagccttttggttcctgttatttattgactggcctaagctctgtaaaaggcaactcccatttcaattagcaaggcagcattatatgcatctgaaacatctatggatccccatttggcctgatgggagggcctgtataatgtctcattacattagcctggctccctactgcttcagaggtcatttgtgcagggggcaatactgacatttccctctgagtgacctctggctgctcccttccctttcaggaatgagttggagtctggcttgggaatagtacccctcttgtctgttctcaagttaggaatgcccaggaatgttgattcctgtttgttgcccatcctctggctacagggctggagttgttctgttcatagcctgacagctgtgtagtcagtctgatttaacatggatttattgagtttctgctagtgggggtgggagtggaggtgggaggatattcacagatggtggagacaggtccctgacctaaggagggggattgctgtgtattcagttcctatcctttggctagtggtttttccttttagcaggatctaatttaacatggttattatgaggtttgaattaatagatatagtggactaagacacattcaaaagggtgaagtcccaaatttatacagaactaaattaatactataaggtaagatgatacaaaaggcttagcatgtatagaacagtgcttttgttttgttttgagtccacattttgacatgttgcccaaagtggcttcaaacttgcagtaccatcaagactggttttaagttccttatccttttgtttcactctactgaattctgcaggtatgtgccatcatactattgaaagcttcctttgtgtcaaacattgtttttactgttttgtacatattaacttatcttcctagcaactttgaaattgtaaccatttggtatctattttacagtttaaagattttttttttgttagtattggttgttgagcccagagtcttctgtatgctaggcaaatgctctaccactgtgttacatctctgagacagagaggcccatttgcattattctttatagctgaatatactaacattatcctaataaatgctctaccaactattatcttcttaggaccactacactacattaatttaccagaattttattcaactaatttcataacagaaactctactgttatcatcaacattcttatgaatttgagcatcatatccccacttccattatgatcaacttatacatctatgaaaaaactttttgccactaacactgcatatgagggtagctataaacttactatataaccaaggatagctttaaacttctgattctcctgcttcttccctgccaagtgctggaattacaggtttagaccatcatgccctgcttatgtagtgtggagtattaaaatcagagttttgtatgtgctgaaatgctctaccaactgagctacatccctaaacctccagttctcttttgactttttattttgacaaagagtctcactaagtagcctagattgaccttgattcattcttacagcccaggcagggctttgaacttcctcaggctcccaggtagctactataataggcctgtgtcccaaacctggcttaaaagaggacttaaaaatcttgcctgtactggcatagcttgtatcagagtcagactgtgaactcttggccacatgctgtagcccctgtaataatccagtgagctcacacgtggtggagatttactatttgctggcacagagaggcatagccttgaagtgagtgcatttttactcaggttacaaacaagtgaagagaccccagcaacatgctttatgtttagacttttaaagaaaacaccactccaaaacaaaactacaaaacttcttccctcttagccatttctatacaagttcttattaagaatatctgaattggatcataactatgcagtgtatctgtctttggcagctaatttctagagaaatcaggctcattagaaaaggcaaatgctgatagaggcatatctgttaagagctattagtatctatgatttttcattacatccccttcatgtgtcagtgcctttaataaatgtactatctatgacttaaagttactgtccatctcatttgcagttcagggaattactcatctagtgactaatattcccaagtcttaaaaaggcttcagagcccttgtcatctgaggtgtgctttaaaatcacctgcccatatgataacatgaacatagaaaggaaattgtctgggtggtggtggtagtctgtgcaaacaaggaactttagtataaataagaggttcaaaaacaaggaaggccttgggagcttccataatttaacactgttcaaaagcacagaccatagcaaggaatggtggtatgggatttgaactgggctggtgggccacaacccttccttgtcctctcaacccaaggcattgaggatttgagctgttggaggttgagtctcttccaggagtgaccagttacatgctaggacagggatgtcgttaatgtttcagaggaatgggtaagtgggtggaggacaaggctgaggccgcacaggccactagaaaagggggattattttgggagaggaaatgtgccaagtcagaggaggaaatggggggaggggagggtggtgatgcaagatataatagtacatgagaatgccataatgaaacccatttaataaatactaaaacagaactgcaggaagatataaccatagactctagcctttccagtccctcatgataagtaggtccctgtcatccatatgttcaagatttcctttgctcattcagaagtgtctggcacctcaggaggctgcacagctgtatacagcagtctgaaccattgctataacttcctgtttgtcttcttatgaaggttccccctgataatctatctgtatatttattttagatttactctttaaatgtgtatctgtgtgtatatgaacatatatgtatgtggttgcctgagattgccagaagagggtgttgggctcccctggaactggagttaagtatcttgtgagttgttttacatcagtgctgtgaactgagctcaggtcctctagaacaacagcaagtgctcctaacccctgagccatctattcagcccagaaataatgttaacatttaaaatcaattacatgaaacaaatttatacctctaccaaaattgcatgctttggggtcagactgcttagtttgaagtctcacccccacctctttcaacccccactgctaggtttccctgcctataaccagagataataatagcacttaggtcagatagtaagtgtgaagtgcttagtttcgtacccaacgaataagcagtcagatgctagttataataatgatggtgttattagctggagggctcataatactaggatggaattacgatcacctcagttatagaaaaggacaaaatgtccctttctctattggaaccatgattttataaaggacagattgccatctctaggaggcctgatcctggaaaagtcatatagtaagagatattcttgggtcacctcctagattaagttttctgaggcccttgtgtggaagaatacagtgtgattgttctggagtgcttgaatctgtcactggtgggaggcaagttcttgtttagaaaatgtcaccaagttataaccaacactttgttcttcattcaatctgctctctttcccccttatgtttatttaatagttagaaaagcactgaaatgtacttttcctatgtgaacatgcacatctgaaacttgtttttcccagatcttgaaaatcttttaaaaatcacagacggagggctagctttgttagtaaagtacttgcttaaattaacacgcatgaaaacatggggtttgatccccagcaccacataaagcctggcctggtcatgggttcctttaagcctagcacttgggaagcagatgcaggtgggtctctttgagtttgaggccagcctggtttatgtagctaattccaggacagtcatcgttacatagagagaccctgtcttccctacaaaaaaaaaaaaggaaaggaaaaataattcaaggtcattttcagttaaatacatgaaatctgaaatatatacctcaaagagcataagagaaaaaaagccctataggtaaggcttgtttcagacaaggtcttgctgtggcctactctggccatgaacattcattcttcctgtcttacttatgtcctggctccctcagagtcaccactgtgaaaggctgtcattcagttttggaagcattttttggtcttatatgttgactcttggttccttggtttgtgctcatttttcacacagcaaggctgtaaggaattttgggttcctcatctttgcaggaatcagtcaggactcagggttggaaaatgttgggttttctcccttgttctcactaaatgcattctgggaaggctctgccaaaaggggaaattgattgtgtaagaagggcatttcccttattatagctttcaaattaagatgcttccttctcctttctcttcttcccataatcggagttaccagtaaaacggttgtgcaggactcttgagatgtgtttgtcacagtgtgatggacagaggagttgcctgagcttgtccttatcttctcatcgatccctatacacaggaattacaggaaatcacagctagcatataaaaccgcagacagatgggaaggatggaatgtgtaacccccattcccagaaacaagcagagtgccgagctgactgaccttagcatttggcatctgtcagcagagtcaaagcattgaggtctgaagataatggcaccatctgggaatggaaaccttatcttccagctctgctcagtactcctcctccttcacaaccctccttgtgccatcgtctgcaggtttctgtcaccattttccttgctaggcctttttgtagttgttctgactggctttgcatcttgctgtagttgttctggccggagtcagttagctccctttcatggtgcttatcatctctggggattaggtaaaagaataaaagctgttgtcagggtgtgacacccctattctttccttcctgtgttcctggagggcctctagctgatgctgtggaattagattaggtcaggtttcttgctcaagaacagttgtttcccactgcctgctgacccaaggagaagtttccaagctggccttacctgaagagtcaattgaatgctaaatactttgtaaaataaccagaacttgccaggtggcagaaactgtggaaatcagtaagaattgtgccttaatctgaggattttagagtgcaatttattttgtgtatcttatatcttgggtatcctaagtttccgggctaatatcacttatcagtgagtacatattgtgagagttcctttgtgattgggttacctcactcaggatgatgccccccaggtccatccatttgcctaggaatttcataaattcattctttttaatagctgagtagtactccattgtgtaaatgtaccacattttctgtatccattcctctgttgaggggcatctgggttctttccagcttctggctattataaataaggctgctatgaacatagtgaagcatgtgtccttcttaccggttgggacatcttctggatatatgcccaggagaggtattgctggatcctgtctttgtttcttaatacttttttattactgtttttaagatatggcatcattatgtagctcaggctggcctcaaatatgtgatcctcctgtctcagcctcctgagagctggattacagctatataccattgttgcattttcccagccatcaaagcttttatgtccagcttcctgactttcctttagaaggccctctttgattatcttggttcagagtaatttcttttttctctttttgtttttcattattttgttcataactcataagtagttgttgctcattcctcgttttcatactttacagttcaacattattgcacccacatagagtattaagatagatatgcctgctttggttgtttgctatctgaatctgcagtcaccttaactctgttgaaagttctgatgagtttgaggtctgtgccttctatgtattttacaaactatctagagaagactgttaggaaatgataaaacagcaaacatgggtcttaacagaatttcaggtgttctcagagggtagagcaaggatcgggagactgggtgccatttggagtttttaggatattggggaccaacacctaagagaaactggcaagaacaggcacagtattacaagtttgtcctaccttgagatttttctagaagctgaaaggtttgggtagaaaatacatttattttagattgctaggagctcttagcaggggcctctatttgctctagttcctttttgtggtgaatcaccccaatagaaggtgtgaaaaaatgcttagtcacagggaagtttatagttcaaggaactagataggagtaccaataagcagagctgtcagactaagtaaggatttacgtatttgtattattgacattgaattgcatttatctgggtagcttggagatttgaacttgttatacaaaggcctatgctaggtttttaacaactaatagaatcttgcataaaattaaaagtaggccgggcgtggtggcaaacgcctttaatcccagcactcgggaggcagagaaagactgatttctgagttcgaggacagccagggctacacagagaaaccctgtctcgaaaaaccaaaaaaaaaaaaaaaaaataaaataaaaaaaaaataaaaataaataaaataaaataaaagtagtaccttctacttctgacttgggagtagagttttaagcatcatgttgacccatccctactcccaaaccccatttctcttatctgaactggctatgactgtggaacatttgtaacaactgtgagcaaggaccaacttcagccagataaattccttgggtacctttaagtttgctgaatttaggtagaaagtgtagttgcatagacagaactcagggagttgtcgtttacatggaaataaaactagtgtcaatttttttcctcacaagactttcttcaactctttctttacctttgcagatcctttatttttgcaagtgcactcttgggtagcagctctcctactgttacgtagataagctagtgaatgattatcagaatcccgtgtctttgaaaaatgctgctgcctcttcctgtactattctgcctaaaaagagagtgacttgcatttacctaaatgttgcagcattttgtgatgaagtttagttctttagtagtagtgatgattatatatagtatcaggtacactgattaagttgtgaattagactactactttgtaaaaattatttttcttaataatttaaaatgttataagcaagggaggctgcaaagatttctgatcattaagatgttttcatcatacctttgcttcaaggtcttggagtataggatcaccagccagaatgggatagtaaatagatttgatctttattggcctctttctgcacattaaaaaaaaagtattttatgtgcatggggtagggtgaatggaggtcagaagacaactttgagtaggttctttctaaatagtgatgtaggtctgaggaatcaaacttaggttgtcaagcttagtagcatgcttgctctttttatcaactgagccttgttgccagtcccctctctgcacagatattgacatgtaattttgttttgttataatcagaacagaaactgtgctttggcagttgaacaactgtacttcctgtctgtttagatgtgtgtgtgtgtgtgtgtgtgtgtgtgtgtgtgtgtgtgtgagagagagagagagagagagagagagatactcttttccaccttaccttacatatactctgatccaaagtaggcagcctggttgagagctggggtcacagagtaattgctgttgaaagtagaggttgaggtgacagggcagttgggcgctgacattaaagacttgtctgctagactgatggcccacccccaagggtaacttctctatagtgactgcttctcatagctaagttaatatgactagctagacaaggaggtaggctcctgggaaacaggctgtggagtcttaattaagcctgcctgcacatatcctgttatgtactaacagatttccctcagtcttacatttctaagggtcccattttttaaattgtgtgtgtgtgtgtgtgtgtgtgtgtgtgtgtgtgtgtgtgtgatgcatctgtacagacagagacagtctatctcatgttctgttgcaaatgcttgctgctttctttccagaagagaaggtaggtacctgttactattttctcatgagctcttcgtgccacactggcgctcctaatgagttccttatctggtagagcggcctcagcaagtgcccttccaggagtgtttagaatatacctaacccagggagagcagacctgtggctgatatgtgtccttgaagatttagttagcagtcacattctgattgggaaacacctgagaaaactgttgagtgagagaactgggctctggtttaggcactcaggcctgtgtccctaggcaagttgcagctcatgctgaggttatagtttctattaaattgaatagataggacatgataagatggccttatagttcattttaggtagtaatggttagggtctcatgctagcagcaaaggtgggagtgattcccaattctcttttgcctcttaagttgtttctttttggaatgatccttatgtttttctctacctctttcatgtctgtttaggtaacatctataaagccagggtctgtttggatcactgcattctgggtgtctctggcctaccttactgtttttgccctggactcagcacttccccactgtactgccatctgtttacttgtttgcccttacattttagagaacttcctgagagcaccacctttgtcactgtgacaaacttccttttgtccccacctctgtcatcactgtttccctagttgctggtacactgcttagattgtggtgtgtatgaccactcctgggccagtttgagagttgtactgggtctttccctaactaaactctttacccagtctctttatgagctctgtgggtgctggagaaccttggatgctgctgctgattttgagctgtgccaacccccaggcacttttgtaatcagggatgggccttagttttgtcctgttcatattcagccatctgcctagggctagggccatctgctgcctgtgagtgacctgagcaagggaagcggttgtgaatcagtgtgggtgagcagcagcctattttttaagggactaattatatggatgagtctagggctgcctccccaactctgacttctgtgtaatgcatgttatgtctcattttatccaggtcttagttttgttctagatgctgccttctaactactctactagagagcctttgctgagtttttgtttactttgtgagtgctttgtcctttagccctggtccttgagaataatcttcatgtaatataaatagcactgcagaaagaaaaaccagggaaataaaaacctttagaaatgaacctttgggtctctttcagatgtaaatgatgagcctctatctatcatcttgtaactttaggttcatcaccctgttttccatttttcctcctgagacatcttcaaacaacatgtatggactgaattacttacttggaaggttgtgggtcaagcttgcatttcttcagctttgtacagagaaggaaaaaatgcaagaagaaagtaatgtgccctcatcattcttagtaacttctgagtttggaggctctcagctggcataaaattatgaatgaaaactactaagaggtagggatagtatgggaattttaattttaatttttttaaagatagggtcccatgcgtttcaggttggcctaggacttgatatataggtgaggatgacctcacctcctcctaagtgctgagattactggtatgtatgctccgtcagaccatattttaggcagtgttagggagccctatactaaatgagtgagctacatcccccaccccaagaagaggagtatgcatctatctctttctctctctctcagtctgtctctgtctctgtctctgtctctgtctctctctctctctctctctctctctctgtgtgtgtgtgtgtgtgtgtgtgtgtgtgtgagagagagagagagagagagagagagagagagagagagagagagaaagagaacttttaaacaaccaccacaacaaaacctcagtggtaggattaaccagtagaaatgagtgggattggctactgtgctatctatcttttaggacttccttaaagggctgctggggacctttatgtagtgaaagataaagtggctgaagtctgctggcaggggaatgttgtccttggcattcatgatagtgcattgtgggtgaatatgtcacaatgctatgagtataataaaagaaaaatatacaagtcttttcattttggagagtgatacataccattatttcattttaacttacttgtggatttccttctgggttgctcatttcctactgtttctaacatagatgctgaggctgtttaactcagactttgcctaatttatctctcttctcttgtctaatactcttaaaaagaaaaatgggagaaaaagaagagaaagtaactaagaatcacagaatttagaacagagatgctctccaaatagagctcacctgtcccaaccctctatttcaaatgatgataacaataataaggataggtattagtgataatagtcatgctcttaactgctgagccatctctccagccctgtattaataatagtaactatcatttttgatgactcatgccagcattatgctaagtgttttgtgttcctttccttatatagtgcagaaaagccatgtaggtgaaataagtaagcagaagaggaaccggaggttcaggcaggttggatagttatgctgggattatgactggaagcccgtcttgtgcagcgatgaattatctttgcttgctcaaggtcagtttttccagttagtggtgatacataagtagagcccacttctcttgactttgactttcttttttaagacttatttattatatttatatgagtacactgtagctgttttcagacacacactagaagagggcatcagattctattacagatggttgtgagccaccatgtggttgctgggaattgaactcaggacctctggaagagcagtcagtgcacttaactgctgagccagctctccagcccgactttgactttcattgagcacagtttttgttttgttttgaactcaaagattccttctctgattattttctctcctttattgctctcttaccccatttaatttcagtgaaactgaatgaaataaaggaaaggatggtttaagtttggagtttttggtgagctttaaaggtttatttttaaataggcagtcttcccagacagactgggaatgtagcagaaggcctgagaaccaggaagtgacacagacctgtttatatcatcccacttgagggcctttggaaagccatccacgtagatgctaaaaagtaaacacaagggcagcagccttttctttgcgttttctatttctgacatggaggaggtgtttcctgcacagctataactactctgaacactaaaatctggttcctaaatatcctctccagtgacatatatagatatgtatttatttcttgttaccagacagaaacattctgtgattctaggcagatacaatgaattgctcccctcttcgtcctaaaaggtgacttggtattctgagtttttgttcgtttgtttgttttgttgtttttgttttatcannnnnnnnnnnnnnnnnnnntaattataagtctttgttcttaacttagttcttcatcactttttaggataaagaggggaacaattcattgtgtctgcttaaaatcacagaatgtttctgtctggtaacaagaaataaatacatatctatatatgtcactggagaggatatttaggaaccagattttagtgttcagagtagttatagctgtgcaggaaacacctcctccatgtcagaaatagcaaacccaaaggaaaaggctgctgcacttgtgttcatttctttgtttcctcttagcactataaaatattttttttcttttaggtccttgtaacaatttgaatgatgtagataaggatgtacttcaccagcatattgtaaattctttgagagcaagatatcacatttgatctctgtgattacccaaaccttgtatagaagacagctagtacatatttgctgaactgcagtagagttggttcctggaaacatagagttgtgagggttcagattgagcaaatcattttcttgaatttctatttgcaaaatgagtattggagcctgttcctttcagctctgctgtgaatcatgtagaaggtataatgacatataagatctatctctggggcctagaaactaaccgctgctgtttctgtcaagcatttgctatctgcctcaaacttgaactcagtacacccccttccctcctgctttatgtctgttgctgctttgccctcttttctgttctgcacaaactgttggaggtttttatctccttcttcccctgagttcaacaagcatttttggagcactctgagtggtggagagaagtagaattggtgaaacagtcactacctgtggtagatgcagcatgtggaagaaacctgtctctgtatgggcttcaaggagggggatatacttggttatctcaagctagaattgcctcaggaggcagggacaggttaattaatctctgagttcaaggatcacttggtatacacagagatccaggccagccagggttacatagagtgccccccccccccaaacaaaagagcaggttactcttttcaagcaggcaaatgggtatttaatttttcatatatgcttagttaagtgcctttaaaatattttggaatttggaaagagctttgtttaacgttgagaaaggaaggttcacttgtttaattaactcattggttgttttgggattttgcttttttttaatctgaactgacctcatgctttgagcctgatttcgggatgtttctaaaccacattcaaagactgcccttagggaatccagtgggtatcagccacagcctgatggaagaaagaaccctcaccatcatgaactgaagtcagtttccgatatagtctacagctcatgcttgctgttttctacctcacatagtcccggaagattggtgtcatccagtttgcagatgggaactgaaaatactttccctagaccagccgattaaaaataataataataaaaaatactatccaagtggaccagagatctgccctggtctgcaatgctgttcttgagagatacttagctgaaccattttctgtccactggcaaggaaacagaagcaaaggacgtgaagtttctgttgtagtttggcctaacagtccatggtaaagctctgccttaaaaaagtggcttcctggctacagattagacatttatggctgagttccttgctttctcttgttttcctgtcacagtcatttttgctttgttctccttttttcctcatttctcctacatttttttctctcttcctaggctactacagtgctacagtgttcctggtgtgttgactcctggggtggttggctttttgattttttttccctctcctttgttagatgtttgttatttttggaaagtgcattaggaacactgtgtgctagatgatgggtacaaatgtgctgatggattgattaagctctaaatggaaagtagactctcttaagtttactgcattgcagagggagatagatagagtttggtcttagaagatgaaggcagaagggctgctaggatagatttaacacttctttcttttggttagaatagaacatttgaagactttttcagaggaaatactttcgggtcacttctagaaggctttgaattccttagccctgaaagggccttgggagccatccaggtccatccctaagcactgggaagactgggtggcttgcccgaggacagaaccactgcctaatgctgaagctggacctagctgtctactatcagctccctgctatagccaagactgctgcggtcctagaggactgagaagactgaacgaggatatggtagtgtgtcactggttggtattcctgcttgcctggatcttgggagaaagtatgatgccctgagtatatcaacagcagttcttctggagcagcacaggttgtaaggagtagcaaagcaattcaagaaaatccctggcacattccagtaacttttaggtggcttaagaggaaagctgagggtgatttttataattaggagcaggttaaatttcaacaaaagttatttttacctaggagtggtggagcatagctataatctcagcatttgagaggttggttgcaaattcaagggcagcctggattacctagccctccccttctctctcccttcccttcatctcccttctgcttccctgctctggcctgcagtgaaatgggtaaggtaatgttctgtcaaatgttccttaaatcccaatagaagaaattgtggctgttgaagcactgaaataaatgttagtggctcagaggaaatagaagttggtgactggaaatatccataggagaaagaaatagagtgcatctacaaaacctcatattgtttataggggatggtaggaggtcctaagggtttgaaggtgaatgagaggggaaaattctgcaattccttcaaagatggtaagagttagcgaagggcctggatagtcactttttgatattctcctctggagactttggacttcttgtaattacattatgaaatgtaatcaggtgcttacattctgttcatactttaggaaatggtctttgtcctttcccttagcagtgagagggttggtgtagatagtcaaaggaatacactatcttgttctacactcttactctcccccaccttctgtattagtctgagataagaaaaggtttcaaattgtttttttcttcccagttccctttccttcctgattaatggatacatgattcgtggcttatttaataattcgtcctagccgggtgtggtggcgcacgcctttaatcccagcactcgggaggcagaggcaggtggatttctgagttcaaggccagcctggtctacagagtgagttccaggacagccagggctacacagagaaaccctgtctcgaaaaaaacaataataataataataataataataataataataataataataataataataattcgtcctaaataatatatgtgaactgaagttaacattccaatgcctgggaatccaggccttctgagtcaggcccttttgaatcaggagagtaaagctcggtgtgacatgaccccgaaacttcagcaagactggcattctccgcaggagtggaggcatctggtcaagtggactaagatgatgtgtgcccgatctgcctagtgaatagggtgcctgctgtttcatgttgtcccacctgttgctactttctgaagcattgagatacttttgaaggtaactcttgggcaccttcttagcaggttgtatcattaacctggaagcattaatggtaacagtaagcaaacaaaccttataaacattgggctcaagttgcaggttctggccaagactatacagaagccctaggtctagttaacagaatttattctcagttttctttttggaccagctgagcttcatcagagcctagtaagatagtaannnnnnnnnnnnnnnnnnnnnnnnnnnnnnnnnnnnnnnnnnnnnnnnnnnnnnnnnnnnnnnnnnnnnnccccccccccccccccccccccgtacagaggaagaaacaagcagaggtgaggtgagtgactccctagagttagagttgtagcttagggacaacatgaaagttaggggcagaaatgagtgcttgtcacactgagcaggatgcagtcccctaggttttaatgtcattggttcatgaatatgaaaggctagcatcttgtccttgtggggctgaccatctataatctatagctcgtggggcttattgatactgcccactttgaggacaacagctatgtttccaagaaactaaaccagaacaatgaatgcaggtgactttttagtgactatactactaaagaaagtgatacccctctcccaatttggtgttgtttgaaacagggtcttatactgtagcccaggctagcatttctgtctcactgttttgagttctgagattataggtgtatagaaccatacccaactgaagacttttaacattctatgttaaagcagataattccttatttagatctaatttactgtatgactttttgtccaaattagcagagttttcttgtagctggtgatactctggggtcttgcaagttgactttcctctgttattttgaagtagtaaccttagaccatcctttacataaatactccattgatgacactctgtttatgttttccctgttttgtaaagtccacataccactctctgcattgtacttgatcaagtactaggttttattggtctcttggttcaagtagctgcctaagcaataagagagaagccagcagttggtgagacagaataaatcaggagcgtgtactcctccaccttctccccactttctgtctcctcccacagtttggcaaacattagcaatctcctgtcaaatgcaagggcctatgcttttctcttaaagattccaaaatgagtgatttactatctctgccttcaaggaactttcaatccactaaggtgaggcagataaacaaatagatacactagccagttcaagctgaagtagtaaagggttccaaggagccagttctcctgggaataggcacggtaggaagtgtcaggaaagggactctttctggagatacgcatcagactgaccccttaaagtgactattcctagaagtttgttgaggaaatagacaaaaaggtcatgttacatgaaattgatttgtattttatctctctgaaaagttaatatgagtacaaagtacagtgctcaagaatattgagaaagtgcatatagtaattgttggtttttttgcctcttgatttttaaccatttagttcctcttcctaacagcaatgtttgttgtgcattattcctgagtgatttttggtgtatataagtgtgtgtgtaacatagatcctttaaaaatccaagcatgggctgggtataatggcacacacctaaccctagcacttgggaggctgaggcaagaggatgaagagtttaaagcagcctgggctgcctagcaaggtcaataccaatctgagctacagagattatatcttacaaagctaacataaattaataaattaaaaaactacaagtgtaggggaacaccctcatagaggcagggggtggggggggagggaagggatagggggtttccagaaggaagacctggaaaggggataacaataaggaaaatatccaataaaagaaaaaacaaacaaacaaacaaacaaaaaaacaagtatacatccatttttttcagacattaatctaagaaggcattttatattagcaaggtttagatgccccatttttaagtaaccaaacagtatttttaaatgtactataactaatttagccaacctccttcttaactttcagattgtcccagtattttccttttctaaacaatgttcttgggtgtcctatatatgtctatgctatttgcacacttgtgatttctgatgatagatctggaattagaatcaataagtcagagaatatgttctttttgggacctgtgttattaagttgccttccaaaaaagcattatatataacataaaaatgttgacattatcttctgtcttgaccaattctttaaaaagtgagagtgatcttaaaaaataaaattggtgtcctgagactaaagagatggcttagtggttaagagtgcctatcaagtagctcacaactgtgttcctccagttccagaggatttaacacccctcctccaacctccacattcaatatgtgcatacctatacacagaaaaaaatatatatatacataatttaaaacaataaaatttttaaaaattttgctcttgtaacttccatacttaatatccttgtcagttttacttatttttcaagtacacattcaactccttggtttagccttcttctgaacctttgtcaggagtagtcttgattcacctgtatgtggtaaaaccttcctgcttcctctacagccccctgtcctccaatacatcatttaggactcagactagcatcaagctcctctgggtggtattttttaactcctgataatcatgtgcagaacacctaaggcactaccttacatgaatgcactcaccacttaaatatgtattgcacatgtgcagtgatatggcacatgcagatggcattcttgatggttcccagttgttgccttaaagagatgactgaagaattcctcatagggctatctactgtggatatactgaaatggtagcaccacaaggctcattgttaatcttttattagccacctagagctctggtcatatcctttaacatctttaacctctttgactttaaacaccaccacctctttttacatcttatagaaaagctgcttggctgtagcagcaatgacaataaggttactgaggacttaaataggttgggcactttgcttgagtcaaaacctttcacagagaggaaactgggctaagagctacaaggaacaaatatttcaatataggcattcccagtctcccgtttgtagctatataaatgtgaacccatctacatatgcatagacatacagacttctctgtgagccactctgtctacagctgtaaaggctcaatttagagtctgggtaaaagccaagaatcaaagaggcttttgtcacaattgtcagaggaaaagaagtcaagatcagttattggctagctctgttcttgatccctgcctactgtttactgaagagtctcataactgctctattttatactgagaaaactcatgttacttcttgcagttgtcttctcttggggggaaacatgagttgacttcagacatatattaaagttgagtctggttatctttggccaagactcagggagtcctttataagggttataaatgggaggccctctgatctgtgcttttagagctttacattgaatgtatggagatatttaaaaaataaattatgttattttgaatacctcctataaactagagtatttgagtagctgataaataactgaataaaataggcctattttatgttttatcaacccagcatcttctctaaagacatttagaaaataatccttaaattcttgactactacttggttttgattgtttgagacagggtctcactgtatagtcttggttgacctggaactccccatatagactaggttggccttgaactcacagagacctccctgcctcttcctccagaaaactgagtttaaaggtgtgtgccaccacactgggcttgatttttatttttttctttaaatggtacttcttactattcttcataagtcagcctgaaccagaatgggtggtggggccatttagcaactacagcctgtcttccacatcctcatcattttaaaggctagttaatagaatgtcacccctctggtcacaggcgtgtgggttgagccttgaatggtttgagattcggtgctgttgaaagagatcctcagagggaggcttcttagcctctgataagcaaggcctctgtgcccttggctcctgctgctgcattccttctctaggcggtgtagttattcctttaagacatgtgctcactctgtttttccttttggttagctgaagttgctttgaggccaagtgacataggcggagcagctctgtgtcaacagctgctttctgctggagcccataagccagtggtcctgacagagcaggcaatttctgaaagggactctgacctggctggctgggcaggtaatgcacaggtgagctggatctgtcctctgtccctttttgaaagggtctgcctcctagatcagattttgactacagctggcggcgaactttggaagctctccaggaggagcttctgtgcttgtctcttcttggcagtaaggattcagttgctagaattcttccaactttgtgtgtgattgtggcttcctgacagattgctttcatctaaccaacttatagctgaacttttcacattacttaagttcttttttgtttgtttgttataggtgaagctactcctggctggctttaggattcttctggattttaaagtcgttctttttaaaaataaataaataaataaaaacctccgacggataaaagatgtgccatggcaagatagcaccaaagagcagctcagagtttgttgtgacttctgtggggcatggagtgtttcttcaactggtgatcctttgcgctctgctgggagatggattagcctctggtaagttcacatctgccttttgtgtttgggaggggaagactttataccaggatttcttcctggaacctcagacagttcaggaagagctgtttgtttgtttgtttgttttgttttattttataatctggtatgtacagcacaaagccagttctttgaagcctaatagagtgagacgggaagcctgctggtgatttcagtatctcccttccctccagctgttggcatctttagcaagaggaaaacttaggatgcagggcatgatattcagggaaggaaatgagctgagttagactacctgggtttagagcccattcctattactacctatgaccctgagcaaatcactgttactgtgaatttctggcttcctcagctgcagagtaggttaatgacagtacctacctctctgagggttgtaaaggtattattattattgcatagtaaaacactacttaatgatgttcactctcttgttgttgtttgttcatttttttccttgtttttctgtgcctcttctcagactaggtatatagttgagatactgtatcttagtgaaaatagggcctggtaactggcattgtaattagagcaaagccacccaactgtcctgttgctcagtttcttcatgtgttcaatgaagaagttgactgtcatttctagctcctcagtctgttctttcatgattctgagagcttttttttattgaggatgataagatggaatgttcctaagagaggctgagaatgcaggagtgagccattttgaatttgttgattcttgatgcgttaacagtactctaaagtccctaatcgcttcattttgtgcaatccagacctggcatcctttccaaaaaaaacacatacttggatgtactgagcaggccattggatggcatgccagaagcatctgtgtatctgagtcctggtgtgaacattggtgtttgacaataatggaatccttgccagagttctttaaaacaaccaggatggcaatttttttggatttgttccctggagagagattgcagttatcctggaatggggctttagtggtaataaggcacattatatatggctgtggacttttcataattcagtgctttctcttctattgcttatcatttctattatcctcttacccatacatactgataggagggcaggttcgtctacttgtagcattattctgaactgttgagagaaacggttattgattcggttgtttcattatagccttccctattgtgtacatacttccttttctgattcttctccttctgccctttccttcctagccatgaggaaggaaccccagttcaacctctggtaccattgatgattgggactccatagtatggggtcatgcttgtatgaaaaggaaaacaagactggcctatacaaggtctccagaagtgataggtacagaaacacagtgtaaaagttgtcatgctcactgctcttaactgtagagcagaagctagcaagttgctccacgctaacctccctctatgtagcgagagctagtctggagaacttgatctaatgctgtaacacaggttggccttgagcttgaggacctccttcctctaactctttagtgctgggattataaatgtgtaccaccattcctggcttctgcctgcttttgtatgacctgaatgctaactgtatttttaacatgctaaaaaaaaaagcagaaaagtaatattttgttacatgtaagaataatatgaaattcaaatttcaattcctataagttggatttgagtggaacgtggtgtgctcattcttgaatatatattgtctctggttacttttgttctgtaatggcaaaaagttaaataagtatggtaaaaaccagtggctaaagtgtttggctctttgtctataatcccagcatttaggaaattgaggcaggaggattatgagtttaaggccagcctgggctgcagaatgagaccctggatcagacagacaaaagatttggttcttcatagaagttttgtattcctctgttctcattccccacagttagcctagaacaaatgctgcttagtaggtatgtgcttgaatgagacaactgtcagcactagattaggggtgaactcctcagccagatttcagaagttatccatttgcccgaggtcttaatagctaatggtaggtccaggaacagaacctggactagtgcctaggaaccactgcaaactgcatctccccggatttttcctgggaagctgccctagcatgttaagctgcattgttgctagcagagaattggaagtctttagcccctttagtttcattaagccatctcatcctctccaccttcctttttattgttctatgctttcttccttccattttccacctaccagacacctccccaactttctacccaaagtttcatactggctagataaagggattattattctttactgtggaaaaactatctgtttataatgtgggcccagactagaatggaaaagttgaagctgttttctttcccttccccactgcaaagaatctttcctaccaccctaacattcaagtcatttttattcctcacaacatatgtactatctgggagcagagtgcatacagggagaaggggcttcaccatcactaaagtccagtgtgccaacattgctgccaatgttttccctctgtgaagtggcttctaggagaagacgatacccacccctttggcctgaaaactcagagcacacctgcatggctgtgattgccatgagcactgtgccaagtatgctcaccaggaaaccaaaactctcagataaacagtcaagctaaagaaaggcagttcctttcaggaagagcccctgcttcccccttgtgaatttgagtgtgagtgtgagagagagagagagagagagagagtgtgtgtgtgtgtgtgtgtgtgtgtgtgtgtatgtattaggggcgtgcatgaatgtgaatgtgagttcctgtacctaaacatatgcatgcggaggccagagtaagacatctggtgtcttctattatcttaactgccttgagacagggcctctcactgaactagaagcgttgttttggctacctggccagctagtgagctctcaggagctccttatctccaccccacaatatagatacatgttttataggctttaatgtggatgctagggattctaacttcagtcctcaggtcctcaaacttgaatagcaagtgatcttaacctactaagccatctcttccagaccctaaatctcaatttcttacgtgtttttgtagctgcacctgaatacccatttcagagatatcttaaaatgagtgtttgtaaaatatatagccttgccaccattggactctagtagacaatagacatgctcacatgtcaggcacatttatggttatgagaatcccattggaccatagacaatgcgttccctagaggcattatgtgatcatagcctctgattataaaattacacagagccttgactataatctcaggttaaacaaagaagaatcatgtgtaaagggtcacttgagagttctagggttaaatgacattgtttggggtttgatttccatagtcatcttgcctgcctgcctgccctttcttccatcttctcttcctcatccttcaggattgtttgtttgttttggttgttttttgaaggaatatcaactatgtagccaggctgaccttgtactagtgatctttctgtctcaacctctcaagtgctaggattacagatgtgtgttttcacacctagatgttgtctctcccatctatagctcaagatttggaattatactaacaaaagtattagagaagcattaaccaaaggccagattttcctttggtcttttctataaacagagatttatttattggaggctccattttaggtgtgacagaggaagcatatcttgttgtgcagaagcacaattcgtgatcttcatgggaagatcaggattaaaaacaaactgtgtgtgtgtgctactcacactacctttcttggactagaggaactaggaccccactgtgggaagtctcttccagctctgtctgcttgatccgaagaaacttgagttatgacctcacttgacctctttcatgctgctattaaagaggaacaacaatctttaagaatgtcaggttggtgtgttgtatagactaataaaaatgattggacagcacatgacatataaggtgtgatgtaacttctaaataacaacagagttgttatgtgacctactgttgagtcacactgcacagtggactttgtgaagacaacacctttgctctcatgaaaacatgaactgaataccctgagtcactgtttgtccaggttaagagatttggagcaggtgttaaatctgactgatgaaggattgcttacttgaggaatccctgatgttttccacaaagctcatttttgcatattttgatgatctcaattgaggtggcctgctgacttagatcaaatgctttgcgttctcagttcagaagatactgacaactcagtgttctttgtttctgataccctctccccatgttgccatgatgcataataccatgttaagcatcacagttcacacaatgcaattttgagatagtgggaaaagcagccatctgtatctctatacagcagagtgagaaagtaaagtacttagtttttaaaagataaaaattgttggggctggtgagatggctcagtgggtaagagcacctgactgctcttccaaaggtccggagttcaaatcccagcaaccacatggtggctcacaaccatctgtaacaagatctgacaccctcttctggagtgtctgaagacagctacagtgtacttatatataataaattaataaataaataaattaataaattaaaaacaattgttgagaaccagattctttatgataggatgtagctttggccctaagcactactgtagcagagagattttgtcagacttctttggctcgcctcaccatctcaggaggacctgagttagataatgtataccaagctgggggtggtaggacagcagatagataggaaatgtacataaaggacaccatttctgtgcctaatggagagaggaacttaggtggatgttgggtagcttacctgggcacataattgcaagtgctggaactggctgatatttatgttcatctgactctgttcatgactttgctggcattggcctacctgtactgaatgggaggtgtccttggacccatttcttaagtttcctgattgaagggtgaaggccagctctcagagacttgttctgataatgaataaagaccctatctgtgttctttcctgtatcaaaaggatacaggagtcatctctaggttaccatgttttcttctgaagttgtgttcttacccacagtggctcttggttgtttggttccagtttaggcacagggcttgccaaggcagttctattcttagaaaggaacaatgggggccatagcaatgtgtttctaaatgaggatgtagttcccaaaacatccgcaaagcatcttcctgtcagctgcaaaccctactgacagaagtgatgtaatctctccgtggggtaattacctgtgactataaaaagacttgaggattgtggtaggagctggataggtcaattgctgggtttgttgaaccctggtatcatgaaaagacattgagaaattattctctgcagactaattgtgccatgtttagaacaggtacatgtctttctaataaataagacctgagcccaccaaactgattacctgcctgaatcttagtttaaaatcctcattaaacagaaacttatatctgttcagcagtgggtatccctttactgtggtctaacttgttaacttggaaggtgttttgttttgttttgttttaaatctgtccatcttttcatcaaaagaagatgacaacatactaaaaacaaagagaaaaaaagaaagaaaatgagttggtattcagagtctctaatgattgtgggtaggtttatagatgaactctttgtattacctcctacccactggaagattccattcttctttgtcacttggagtataaacctttgaagggtgtgagcagcttcccactctaggtggcttatgctgctgtggctgggtgccaggactgtggtaaggtaggcatgactttggcctgcccggtgtttacctttggaggccagagagacagcagtgtttaaaagacagcctttccatggttccatgtgaataagacttcattgatagcttagctcttccaactcacttgagcaaattaaatacaaggatatctgaattcatgagaggataaggttaatattaaattcttacaatttatttgtatagaagtgtgaatgggtcagatagattcagttcatgtgtaccttcagtagtgactgtcatagagccactgaggtcagtagtgtagctttgtatttattatatgtagctgccgtttggttcacctcccaccttgtgtttgtgtgtgtagcatgcatgtatgtggggtcatatgtacatggaagcctgaagttgacctttggagtcttccttgatcactgtccactttattcattgagccaaggatctcttctcacttgaaccatagcttaccagtctgaccggtctagctagccagcttgttctagggatcttctatttaccccccctttttccttttttcaaactaaatttatttcttcactctacatcccaatatcagatcccctcaccttccagtaccccctcatgcagattcttccctcattccaccttcccctttgcaaagaggaagttcctttagtgtgttagcgccccccccccattacccaagcctcacaagttaagttgctgtgggactaactgcatcctcccccactgaggctaagtttctgtctgcaagcataactgtatcattaatagcattaggaattggttcttgcccatgggatgggtctcaatttggggcagtcattggttggccttttcctccatctctgctctatctttgtccctgtacttagacaagacacattttgggtcaaaggtttatgggtaggttactgtccttattcctcaactggggagtcctgcctggctagaaggaagtggccacttccggatccacatcccccattgctaggatcacccaatatatcccctggggcnnnnnnnnnnnnnnnnnnnnnnnnnnnnnnnnnnnnnnnnnnnnnnnnnnnnnnnnnnnnnnnnnnnnnccccccccctggcccccggcccccggcccccggccaatttgcattctctcttccctgctctccctacttctgattttcccacccccaattccctccttctatcagcatctgatatctattttgtttcccttcctgagaaagattcaaccatcttctcttgggccctccttgttatttgtcttctttgagtccgttgattattgtgtggttatccatactttatggctaatatccacttataagtgagtatataccatgcatgctcttttggttctggtttacctcattcaggataatattttctagctctatccatttgcctgtgaaattcacgatgtccttgtttttaatgactgaatagtattcaattgtgtacaatgaaccacattttctttgtccattcttcaactgagggatatctgagttgtttccagtttctggatattatgaataaggctgctatgaacaagttgagcatagttgatcaagtgtccttgtgggatattagaacatcttttgggtatatggccaggagtggtatagctgggtcttaagatagatgtattcccaattttttgagaaaccaccaaattgattttcagagtggttatacaagtttgcactcccatcagcagtagagtattctcctttctccaaaaccacgccagcttgtgctgtcccttgagttttgatcttaggcattctcagagtcatttttacttacatttccctggtgactaaggatgttgaacatttctttgggtgcttcttggccattcaagattgctgtgttaagaattctctgtagctctgtatcccattttttaattgggttatttggtttgttggtgtctagcttcttgagttctttatgtattttgaatattagccccctgtcagagataaggttggtgaagatcttttcccaatctgtaggctattgttttgtcctattagtagtgtcctttaccttacagtagcttttcagtttcatgaggtcccatttattaattgttgaccttagtgcctaagctattggtgttctgttcaggcagttgtcttctgtactgacaagttcaaggctattcccgactctctattctattatatttagtatgtctggttttaatttgaggtctttggtccatttggacttaagttttgtgcagggtgataaatgcagatttatttgtattcttctacatgctgacatccagttagaccagcaccatttgttgagatgctctcccttttccgttgtatggttttggcttccttgtcaaaaatcaagtgttcataggtatgtgaatttatttctgtgtcttcaacttgatttctattgatcagtctgtttctataccaataccatgtagtttttattactattactctggagtacagcttgaaatcaaggacggtgatacccccagaagttcttttattgttcacgattgttttagctatcctggctttttttgtttgtttttccacatgaagtttagaattgctcttttaagctctgtaaagagttgtgttgcaagccgggcatggtggcacacacctttaatcccagcactcaggaggcagaggcagaggcaggcggatttctgagtttgaggccatcctggtctacagagtgagttccaggacagccagggctatacagagaaaccctgtctcgaaaaacccaaaaaaaaaaaaaaaaaaaaaaaaaaattgtgttgcaattctgacaggtctagcagctagccagcttgctggggggagggggcatcctccatttctaccctcccaattctagagttaggtaggccttcatgctcattcagaattaacaaggattcaaaagatccaaattccagtcctcacatgtaaacaacaaaccctttaaccactaagacatttttttgatgcagaattcctaattttaaaagccttttctacctagattctttgacatctccagagatggagatttctccttgtttgacttattaacttgttagctttgctaatagctacatattaacatataattgttaaatttctaagcagcaatacaaggaagataggtacaagttttcttttccgcaaagcttttttgagggtagaaagtatttttgatattgcaattcttatggggggtggggcataagtgggtttcaggaggttaagactaagtacagcaagcagggttacaaaatctgctatagcattaattattctgactaacaaggaacactttatgaaatgtagagggtgaggtcagttcttcaggtgtagcagacacacgtctcctccagagcgggtgggacatatgttgtcactggcttgagttctgacagttcagccttgttgacttaggaatggctgagagcacaagactgtagctgagattattgcctgcagacgactttgagtggttctgatggcagcctgtccacatttcctaagcttggggataggtgcagagagatttagggtcatagggaaaaagcctctcttccctttaaagttgttcacattactgctgggttacagtagtaatgttttgagtaagtatatatacttagacttattgacagctatgcacagttactcaaacttgccaattcctggactgagaagttagctagagactttcttaggcagtgtagatctctgctttgtatccttaaaaggagactttttttctgagctttctggctttttgaggttgtttatacttaagtttctcagtctttagttcttttttcttttggttgtatatgcatttgcccttaatctcattgaaggcagggacaaaattatatgttgttcctttgcttacctaggccaataataaccctaagggtgtcctggggaaagtccatttgggtggtacttcattgtgggttgtcctctgtaggaggactgacagaactaattctaaggcccataagtagtagcagcatggggacctccctgctgatttatagtttctggtgagatctttgtccccatctttatggtgaggaagttaagaagcatatgaaagtattttcagactgcaggaatgtgggtggagaggaaaagagaggacctagtcagatcccagaatccattgtagaatgggctgatttccagcctgggcagggatctggtggcccaaagtgggaccctttagatttggagtaaagggaaggaggggaggagagaggagaaaaaggaaaatgaacagggagaaggaagactagagtggaggggagagatcagtagaagaatgtaaatgaaaaccatggcatttctaaactctcccttaggctggagtagtgttgtttgaatgggtttgactttatactttatccatagcctcctcttcttctggccacctagcctttgtccctaaaggtcaaggctaaaggccatctttattcctttttgcttgaagattagcatcttcaagcctattctcattttattcttcctgtggctagaatcccacctgctttctcaccctcccacacttccctttatcatgcaagatccagttcagtcacctctttagaggatccatccgacccttaccagttatgggtttgaatgaggaatgttacacatagacttgggtatttgaacacttagttcctacttggttaaaggaggtttaagtggtgcagtcttgctagaggaagtacattactgcggtggtacatgctatgagagttcttcctcaccattcttccagtttgccttttctctgctatgtgcttgtgataaaccatgtgatctctcagcttcctactccttctgccatgcctgctacttagtaccttccctctggaaccataagctcttccatgcataactcttccatgcattgtttatgttcatggtatttatctcaacagtagaaaaacaatctattaatttttaaggaaggaaaataggctttgttgtatgtacataagtggaattaacaagagtctttagtcctggtccttttccttaggggaatgtcagcattttccccaggaatagaagtctattgcctggctgtctttgatttgaaaaagtcatccagattgtggccttggaaaactggaactctttgttttgaagattataatgcattgtattaaaatcctaaaaaacgtgctccaaactctaatgaccatgtgatgattagttacttggtaggatttagaatcaccatggaattacctggatgtatttatgaggggttttctacattgggttagttgaggtgggaagacttgacctaaatgagagtagcaccattttgtaaggctgaggttccccaaactgaaaaaaaaaaaaaaaaaggagaaaggaaactaactgagcagcatggctcacggctctctgcttctgactagctgcctgatgtgactgtttctgcaactgcctagatgcagtataagcagcttcacattcttgccaacagccacagtggactcttccctcagtgtgtgaacccaaagaaatcgtttctttatgttgcctttgttagatattctgtcatggcaacaaatgactagtagagacccagactttccagggtttttgctgtgaaacagttgggtttagtattttcataatcagcatcaagtccattatttagcaagtttgtgttgacagaaggtaagcaggaagggatgcagcaagagtaatggcatggagggctttctgggagccagatactgagctggtttgtgatggaagctgtcacttggcagcgtatgagatcatcaatggtaccaggaacagtacctgccctgagattcaggtggggctgtggtatagcactctgattacaagaatgtaacgagtacatggctaggctttggcactactctgaactatggtagttccatgtgacatctgctctggtgaaggactcaagccctacactggaatacacataaaaaggtcttctgaaaagattgggatagtcagtgtgagactttttttgggggagagacctggaggcaaacaggagttagtaggcagaaaaggcaggaaggcatagggaggtttaacatgccttttcagtcaggctggcttgtataaataaatcatagttcagtcatgaacatggagtgttattttgagctagattttcaaactctgtccccagtggttgagtctataatattggaatggtactatacacaccaggtagggtggtgacagattaaatgttgcagatgtcatcactgttacagtatggaaccttagggtggcagaccacagccaggtggtggggaccttggaaggatagaaagtagtgtaacatctgctgtgtgtcctttgtcagagcttgtcaggttgctttggggtgtagaatggtgcatgtgtttgtgtgcacatatgcttgtggaggccagacggttgggtaactctgagtgtcttcttttattgttattgacttgtcttttttgagatggggtctttcattgaagctggaatttcataaatcaactagactggctggccagtgaagtccagggatttacctgtttctgtttcctcagcaatgggtttataggcacattaccacatctgagtttttgattgggtactgcaatctgaactcagactctgattgtataccaatgactttacctcctcagcactccatttcacttctgttaaaactaatattcagaaaaacaaaacaaaaccccagctggaatcaaagatactggattccctaaactggtacacccattactgtggacggtgaatgtttgatcaccttcactttggtagaatatgttcagaaactgaagtttccaaaaagaaaactgatgcctaaccatagtctaaagtattaatgagtttagaccacacagcaccaaaagaaaagtttagtgtcctgtagagaggcaggatgctgctgtagagatagactcccagtgagtgtcagaagtaaaaaagaggaggaacaaactctcctgtagggtctgaaggattaaaacatgcaaaaaaacaaatactaagggattgattctaagcagggaggtaggggggctagaggaagataaatttaagtacaagttgtgggagaagattgaggatgataaaattggtagttggtcttctatttccctttgagacaggaatcgacaggctcatctaatcgacaggttcatctgtgcagcctgcttatggagaagagtgcaaataggtcccccttctccattctgtcctaccacagctcagctagcctatggagacatgtctgacagaagtttcttatttctctgattcatggtcccctgtggatcttggctagtgtcatggatttcttggggaggccaaaggatgtgagaggttcttacttgattagggaagggagaatagtgaaagtgccatctggcccatgtggattcatcatttgagatctgctctactggagtaattgtggaaatagggtggggactgctctatttgctgtattctaggtttcagagaactatcttaacagagatatatctcaggtttctttagaatggctttcagtaaaggaacccattagttcatatattattcttagcatcttgttaggaagttcagaggctttgtggttcaattagcccttctccttgcattgagaagattggttattaggcaatttttaaaaatatagtgttgactttttatgtcctagatcataatgactttcactggtaatcatttttaaagttgtatgttttacttaaaggttattaaaatcagtttataatgtttaatgttaaaaaacaggttggttccaggtaagtgtaggaatagctaaggtcgttgtataaggagatctggagtgtgtgtgtgtgtgtgtgtgtgtgtgtgtgtgtgtgtgtgtgtgtatacaggtgcctgcagaggccagaggataagattctcctggaactggagtgacaggctatattatgagttgttaggtttggtgctgtgaactaatctcaggtactctataagagtaatatatgcccttaactgctcatccatctcatctctttagctccccaaataatttttccacagacagtggccatatcagacaaaggtattgtagtcatgactgtgaatctgacatctgttttttctattgagaatgagttctgttatagactagagaaacaagagtccaagaagagaatgtatggagcgaaggacagagaacagaggtaccaacagagtttagactatggttgacagtgtctgagatgctgaattgtgtatcacaatactgacttcctggcatataccaatagaaacccactccttccactagtgtgtgccaaaatgtgtcagagggcccacagtgtttcccatgatgaaacaccccttataggtaggagtagtactctttatcagtatatgtcctaccccacttttgctgaaaaacaaatccttagccactacagataggatatggacagaatggcttcatgttaaatctctagtcattctggagagtgaatgaacctatcttacccctttcagagcaagttttggtcaagtgagcagaggagggtgtaaaggtcctgaatccacttaccaacttaattttatcttttatttatttcgtaggtaggttggtttaggttgtttgtttgtttgtttgtttgttttgagacaaggtttctctgtgtagccctggctgtcctggaactccatctgtagaccaggtgaactcaacagagatctgcctgcttctgccttccaggtgctgggactaaaggtatgaattaccactgcccaacaccaacttaattttaaaactagaaaaatctaaatattaaaggaggatctggcaggcctttgctttgtctcctccagatttgttggttcttggaaactatccaacagaaaggggtgggacttggtaaatccccaggctgggttaccttgaccatctcatcccactactattctgccctttctggcagactgagttgtaaaaggcagcgtttcagggaacctttcctgagcttgcactctgtggtatgaaggaacaagaacatgaactggggtactggccatcaatcccatttccaaggacactttctttcccaaggggaatgatgcctctaatgctaagatagatctctttctctgtcagaaacgtaagcatgattgtttaacttgctttgattttgttctgtgaggagggacttttgataagcggcactgaatcggaatggtgaaagtgaaaaaattgtgtgttgctttcctagcacctgcttccagagaggagtgactcctcacactggtcataccccacccctgtactcaaggtcaccacactgcactgcggagtttcatgggctgctgccctgttctcatttccagggtgcacagcattgctagtcaacattctccactgtccggcacagtgtggcttgtgttgtgatggattgcagctgcaggaaattatatctatgtcccttttctttactgtagtttctcccttaataagccttggttgtcttcctctgccctgctcacttccatccttccctccttacccaacaaactccataatgccttccattctgtcagagctgcatatgtgtgttgagtgtgttagtatacacatgttgatcatcagagaccatgtataactgtatgacatgtcccttcagggctctcagtccccttttctttttgtccatgttatgttattcaaagtagctgtgagttccagaatgttttgtcctaagggagtttgctgttgtgcaagttgaatttgaccctgttttctgcctttctttcctgctggagcctggtggtgtttatattggcaagctaaaggacttctgacttaaaaggaattaacatactgcctcagaaccattgtctggccctgtctttctaccctgtggctagggagccaaagaagatttcccagcccttgttaattgttagcctctctgatccagcctgggcagttttcagggaactcaagcactgactagcccaagaactctgttgaaacagggaaagactgaggttggtttgattcattttaagtaaaatcaccagtcttttgatgattccattaatttcctcccttctaaacatgctcttgttagcagtaattggaaatcacgactgtttctcatttcctttaccacactgctttaatctaggcagctggatactgcacactgccttttcatctgctgcaagtatggtttgaagatgattttaatgactggctttggctggatttccaaaagctgagactgttgctgtgatgaagttcatattcacctggagtctgggtgggacgggtggggaagggtcctaccacagagggctctccttggtcttaggaagtatatgaggatgtttccagaccctcgtggcccaggtaggaatgcacaagcttcagcatcagattgcagccggcctgtggtaacacctacaaacactttcatagatgtagttctagtttttgtgcttttctattcttgactctaaagaaaaataaatgatacaaaccacttcaggaggccagagaagtaacagatatttgtagctacagctatgatgtaaatcagatttgtgtatattatcttatcttattgttatccttgtaagaagcatggcacagttcatacaggatgaaactgaaatttgaacctacatcctctcattgtaaatcgaatactttctaaaaaatttatttatttttattttagttatatgattgttttgcctgagtgtgtagatatgccccatatgcattcctggtacctatggaagccacagaggatgttgacatgtgagtaataggggcccagccttagttttctgcaagagcagcaagtgttcttaaccaccaagcccctcaaatatttttatgctgtataattttgtctattttgttttgaacactgacctcccatgccattgtccgatactgtttttgttgttgttgttttttttggttttgttttttgtgtgtgtggttttttttttttttttttttggtttttcgagacagggtttctctgtgtagccctggctgtcctggaactcactttgtagaccaggctgtcctcaaactcataaattcgcctgcctctgcctcccaagtgctgggattaaagacgtgcgccaccatgcccagctgtctagtactgttttaatgacttaaaatagtttgctattttgagacacaggttggtctcaaacttgttccagcctcttaaatgataggactgaagcaatgcactcctacctctagctaacttgactagtaaaagccatttgtgtatatactgggtcctctcatgggaagaagggtcctacagtctaattgaagaaaggatgagatagaggaaatcttagtttttcttgtagttcacacactgaatggcttctgtctagcaaaagaagagctgaaactttaactgggcctggtagacaggatccaaatcagaggattttgaagaaggggggagttggttattagttgagtacttggcactctggggtatagacaagatgctgagatttgtgggggtccttttgctctacctgaatagaaattgtgggtaaagaaatgttggtctctgccagcaagctgtggtaccaggcaggtggtagtagcaagtggcactttgtattgttgcagggctgtgacgtttggactgttaactctacaagtgttattttgtgtggtcctaggaagatgggaaactggtatttgaatccatattatctcacctgtgaaagtgttttgtctgcatgtatgtatgttcaccatgtggatgtacatacagtatggccacacagttcttagctgtggctggcattgcagcttccaggaaggccatggtatcaggattccataccacttagcagcagccaatactacagcacttctctagtctgggaattgggatgccttagcccgtaacactgacctaggttaacagttcttgttctaaggtctaagacctttagccttttgacagctctctgaactcttctggcaacttgagtgtgcagtttctcccttttggctccttacagcttaatcgttcagcctcatctgtctgtcctcacttgtcatctctctccttctgtctcctttcctcttgccctggttcctcttgaactgttaggctgttttgtcctcagctgttagccggtggacttgctgttttcagagctagtctacaactgtttctcagcctgcactactaaaaggaggcaagaaaagaccacttgataaacttattagccctggtgcagcaaaattaagaggaggcagcataggaaaggtattccagctggctcaccctgcttatatagccaagcaagggatggatatttggactaatcacaaccattgaggcttgtatgtcgcactaatcagctgtgcctccttagcatcagtagtctctgctaggtcaccagaagtacttcctttttggcctaggatatcaaggtcatctagagttcactagggctgtggaaacagtctggtgaaactgttttaaacagcccttgctgaggctctgcctttaggagccaagcatttagttgcagttttctcaaggctggagcattgtagatggtgggagctggtatgaggtagttgggctggctatttgactgacagtttttttttttttaaggaagtcagggcagaaagagagtttaacagctgctaattgggttgtcaaattgcatcatcctacccccaccacacaatctttgcttatttataggaatgcttttaataagaactcaaagaacttactgttaatactaacaatgactttaacacttgcctggtgccccagggagtggtgggtcctttccatctaccccagtgcctcttttcatttgctgtgctttcaaaaccagattcccatccctgtataaaacctgaagaacagaccagcaacccacatccttaaaaaaaaaataattaaaaatgtgaaacaattccttagatccccagtactcctcacagaagaggcagtagaaactttactcccttgtccccatcattctgtggcagttggtgagggtggactgcacaaaaacactaatacaagagcattctggtgccttctgtggtttcagaaagcatcatgaatcagggatctgggttttgacgtcataaagcttgccatcatctaggcctaattgaagtcaggggaagaatgaatgtgaggggagtgggtgagaaaggatgttcactaagttgactacagtagctgagtcagttgctagcctcacttgaaaggcaggtggtaggccattaagttctggcctgcttctagttactcttgctactctgactggtaagagttcctttacagatctgatcccatttggggtcttagctttcctatgagagtgttttgaagaagggcaaggttagtttcgtcattaatggaaacaggtctaccatgggacttgtcagtttaagtgagttcttaggatttctgtctgtacttggagaccaaatggaaccttagagtactgaagattagaaagttttcagggctggagagatggttcagtggttaagagactgaatgctcttccgaaggtcctgagttcaaatcccagcacccacatggtggctcacaaccatatgagccgtaatgagatctgataccctcttctagggtgtctgaagacagctacagtgtacttacatataataaatctttaaaggaaaaaaaagaaggtgatgagaaatgatatgccttagcttggggacattgcaaaatactgcctataaagaatgttcaggtcacctctggtagcctgaggcaacagctgaagcagttgttaatcccttgaaggggcccaaccctggcctcaccttacctggacttggttcttggaagaacttcacagagttgtggcaacattgcctgaaaatataagaaattattggtcaaaaatattctagtagccgggcgtggtggtgcacgcctttaatcccagcacttgggaggcagaggcaggtggatttctgagttcaaggccagcctggtctacagagtgagggacagctagggctacacagagaaaccctgtctcgaaaaacaaaaaacaaaacaaaacacacaaaaaaaatgtagtagaaggaagaacacttatttatatgtagtatctttgagatcctagccactttaaatctgttaccatttctccaaaaatctgtaaacattgaataagcaatgtgtgtatatatatattttttttttcttggagtctcaacgtgggaaatgagctgagagaattgcttaagtccagaagtaagagatatgatctcaaaaataaaacaacaataacaaaccaatttgataatacttgggttgtaggctattgtgtacttaaacatatattcttacgcaatatagagtgtatgtgtgtttaaatttttgtcagatttattcatgtattttatgtatgattgttttgcctgtatgtatatatgtgtaccacatgcatttttggtgtgtggagaggtcagaagagggtatcagatctcctagaactggagttatggatgttgggaatcaaacctaggtcgacagcaagagcaacaagttttcttgattgctgagtcatcttttcagccctctgtatgtgttttaaagtataataagcgtttataactttttcactttttttagatttagatttacatgtattctgctgcattaatacaacagttgtagcatttgacttatttgtaactaccattaacaactaaattttaatagtaatatgtaattgtgttaataaaataaaaatattgtcattggttgatcggtaggcatttttcctactgtttaaacaatgccacaaagaacatacttgtacatatgttattagatgtatttatatataggtctgggcttggtagtaaacacctttaattcttgcacttgggagacagaagcaggtggatttgtgtgtttgaggccagcatggactacataataagatgtaggccagccaaaattacatagtaagatccatttttttttttttaaagctatgtatacaggccttcctagcatatacctctagcagcagggctgttgaagtgtggaaagtgtgtgactccaacactgtgcgtcttgtcaagtacttctactaaatacttgtgccagtttatgctcctgctgaaagaaaagaaaatccctttttctcaacaatatctcagcatgcttgttatagttgataaatactgagtgttgtccacctaatgaacaagaaatgaaatcgtgatgtgacttttaagttttttatttcctttatcatctcctagtttataaatcatttaaacatttttaattttctatggctgaggttcttggaggggcctgacaaggttggaactgttttcttattaacacagatgttatttgccctttttgtactcagcatgtatgaagcataatttgcagaggcaacatgatgtctcttcatgatctcactagtgttaatatctatttcctgttatttttaaaagaatttataaataaataaataaataaataaataaataagcttttttctccaaatatggtaataggaacagattctgctttagtggctcagggtccttcataattattttattattttctatttaagaggcattcattcactatgttgttcagactggccccaaattcctaggatcaagtgacttacctagctactttagcttctgtgtagcaaggactacatgcacatgccacgatatctggcctacacatgcatgcatagtacttttccccctactgctaatgcctttagtaatggtaaaggaacctgagaataaagagtttaagaaccaatgctgttttaactattattttactagtatttttccctttggtatatgctttctttgtactgtttcacacatataacatgtataaacacacactaataaccatttttcaatgtagaaagcatattctcttattctagttttataaaaatagcctcttatattttcttctagaagttttagagtatattttatgatgggcaccttctattttttaggactttaactactaaagataatatttaattttatgttttccccaaaatacccaggttgaatataacattttctataatttctttatgggtagggaatgggaggagggtaggcagagattctgccactttctccagactgtctttgttgtttaagggagacatctagcattttgcagattgctaagtgactcccagaagtggtacattatcactttggatccctggttttgtagcttgctgtccagagaccagaatctaccagtgacagagattctagaagcatccactttccagaggcaagggtgttcttattcctgttgtatctgcgagggtggataggtaggatacagccaggcagttaactgtagtcaagggtacaaatgacagccttctccaagcaaaaacaatagctgatattcaaggactttttaaaaaaataaaataaaataaatttatttacttattcactttacaacccaataacagccctttctttcctcccagtactgtctcattgcaagtcctccccccatcccaccttccccttccaagagaaaaggaagtccctctctgggaatcactcccctccttgctcaccaccgatctcccttctctctcccttgctctcctaatgttatgaatttttcaggtaaatggatggaactagaaaatatcctgagtgaggtaacccagacccaaaaggacatgcatggtatgtactcaattatatgtggatattagccataaagtataggataaccacactataatcaacagacccaaagaagctaaataacaaggagaacccaagggaggatggttgaatctttctcagaattagaaataaaatagatatcagatgtcaatggaaggagaaaactgggtaggaaagggaattggaaagggaaggggtctgggaagatcatatgtaaagatattcaaggtcttatatcttataatggttttcctgtctccagtatcttctctcttcctctctccacaaatctcccttctattttgctgctaaaataactcttaaaatctcacacttggagctgagtggcgacggcacaaacctttaatcctaccactgggaaggcagaggcaggcatatctctgttcaaggccagcctggtctacagagtgagttctaggaaagacagggctacacagagaacccctgtattgaaaaacaaggacagaaaacaaaacagaatctcagacttggagtcattacacacaaaatagtttcagtaagcctatggtaagatccacattccatagcatcagaacccccatctttccttccaacttttgttccagaacttacagtttcccaggcatggagttgtccccgtcatatatgatggcctatgcctccagtaccttgcttatgctgttttctctatctaactcaaagtcactctccatttgtctctcagaccccacaaaactagctctcatcctgagaagatgattcccttagcctctctgttaactcaaccattccaattaaaaagaaggtttcgaagttagtacccaatacagggggtggggcagagtgtttgtgcttgctaagcaaacactctaccactgaactaaatccctgactccttcaagttaacttctgtctttgctatagttgtggctttgttagaggaagaaagatatgtctctagcccttccctaagttccttccccataaattctgtatattgggttggcccctgctgttttgcagcctgattttttttttctttttttgtagtagctgcaagaaaagaggatttcttaacttgtggtttaagcagctgatggaggcaccctaattaattgtggtgcctttcaacaaactagccttcatggaggggacccactgaacagactcaaaaatacttaagccctttccccactagctcatttttaaaaaagtaataaatagctatctggtataaaagtgagatatgagttgtgtctgttaaaatgcctggctgcctgaaggaaggctcaaatcagagaaaggattctggatggtatagcagtgttcaaagtaaaatttaataaactcagacagtaaaattaaggcagattaacttttgatttctgaaattgctttgtagcaggaatccatatagtaccaagaaaggaaagtcctgctttatggtgcagggcccaaatggctgcagtagaggaaaggagaggaggaggggggatacttatgggatttttttttttaaatgtccagtagagttggggtttattagcagctcgtttatggccttttcattattgttaagagtagctaatgtagaaatgcagtgagtaggacagtgaaggggagggagggtgacatgttccagccaccaggaagacacttggggttgttggatggcaggctacctttcagcccaggcaaacaggctagatgggatgaattctcaggtttagttaagatttatgccaaagaagtgtgtcggagctctcacacatgctatatgaatgtactaaatgttgtcaagacatcaggttttgtttgcagagaggaacctgaggaagtctcctttgtggatgatggttttcttttttctttctttgaagagtacttccattattatagtaatgtagttattttaaaagtgaaatgtgggaaattgataagccttgattaccaagcagtttgacaggaattttctgtctttcctagttcatacatgtccctctcctgaagccagctgctctgatctaagtgagaaactggggctaaagcagttaggagcactggctgctcttttcagagatctgggttcaattcctagcaccctcatggcagctcacacagagtacatgcaggcgaaacaccaatgcatgtataataaacaaacaaacaaacagagaagaaatttagaagagaaatttaccgtatagtctaacgaagtgtgtgaaatgcaaaatgtaccatgcctttttttgtctttaaaaaaaaaaaaaagtgtgactataacaaaagtattttttcaccctccaaaacagtcattgtccagttgtttttaagtaataagtgctatgatgtatctagcatatgtctgcatttgcatccaagtttttggaccatgtccattgttcagatatgtaaagaggaggaaaagaagaggctggacttcagggatcacgtaggatcagatgaatcgcctgacagtgttagtgttctggaaatgacactgagttcctgtttttcccccgacaagccccatgtcttctgttcctgtatagcagctttgccaagagtaaagggcctggatgtcaaatcctttctctctgccttggcaggggaactgttgtggtttccaagaagccatttttgcaatggggatttttttcccctttctcttatggtaagttgcttcatcatttcccaaaaatgtacagcacctcttgtttaaacagggtgcctttcaagagctttagagcctgcagcaggggtggggtgatgtgagatcttttgtttggtgcttgatgcaagttggaatgtggactgagtgcagaagtctcaacgttctacagcaatggcctgtagaaaggagagactccctgggaagcaagaaccttgggtgtttttgaacctttggcttatctgtgaagaggtaccagccttctgaacacaggttctatctggttgttgcccagtgatttaaatgtggtgaatgtaggttttctgtcataagtagcacatggctgctggattattttaaaatagtgagcataatattgtaggattatgtttgattgctggtgttggagacgagttcagagaaggaactttctaaacacacagctagtatttggtttgggtttgagttgaactgtggagaggcacatatttggcagaaatcatgagacttttagaaagaaattggcggaatttggaagattctggaaacatcgtgaggaaaagtgtgtttagagaagggttgcctatgagagtaaagtggagtatgactccaggtaggagcaagaaagaccccaactgtccagagttgagaaggaaatcatgaagtaggcatcaagaaaggggtggcagacaggctgctgcttttaccttggcttgggtgatcatgtagtggtggtaccagcttctccagtgggacctagcagctgaagcctaggttgtcatgcctgagaatgatcagttgttgggtgccgccagagtaaatcttttaaccaggtggaggtgaagttcctaagtgaccccagtagagttcagcatgacatatcattttaggataagactgactaaagattgctgcacaggccatggggacatctgttgcatcatatttagtttgcagtgaaagagtgttgcttctgaaaaccctagtcaatattgagtgaaatagccttcctctgtatctaccccgttacaaattttcaataagaaacttgggaagctttcgatttttactaaaataaaagagataagtcaaagggtgttttaaatggcgaatcttgctcttggtaagaaatggaaatagaaaaaattaataattactgggagattctgtgggaatgaataagcataaacacactcatcttaaaatcctttaattcctcatagacttggtgaaggtaaaatgaaggtgagtacatttcccttccatctgctggtctggggaggagctgccactccccatagacctggctcaggtgttggcagagatcatggcgtggcctgtagctctgaaaagtgaatcaggccaatctgttacaagatctggctgaggctcagaacacctcagagaagccttggtgttctccaccaaggagtttggggaaaccttccctgagttttgaacaagcaccctgtttactgcccttaattaaagatcaaaatcttcttccccttgtcttgaaagctacccattggggttgcgatgtgaagtatctcatagttgagtaacagtttccctaaaacagccgtcgtctgccagagttccagtagagtggtttatcctttttttgttcagcaatgagaagattgggggagctcaggaagggctgtaggagaaagcatcagacctagagttcagaattagtcctacagtatctatgcccttttcagctgaatggttttgtttggttttgcagacaaaggactgactttagaggacattgtctacttgtatggagaagtgagcatattgattctgtttaccataggctgagctgctctcagctggagaagaagctattgtgctgctattatcattccattgggagatctggcttgaagcgtctgtgaactcttcagggccctatctgcagggctgacaggactttttcaacaaagtgtagggactggagaagttcaggatgagctgtcatttgtgcagttactgataaatttgactttccttgtgcccttggtcatagccacattccttgtttgcagatgagggtacccaagaatatgttttctatagttttattacaataactctgagcccttgggagtgagggcctccagagcaaaattgaaccgtgtgcttctggacatttaggaacaacctgctttttggtctgtcgtaaatcaacacccaatgcttctgagtaataaataaatttggacagttgtacatcagctgagcatactgtgaaagctatgtggccatctgtgttgtagcaggaacttttagaattgaacctttattttgtaagattaaacttgaaaatggaaaatgaaattgctgggtttctagttataagaagagtaggtcttataaagttgacatgcttggaaaatagtgtagaatttagtcagtaaatgtgccaggggttggctaggggaggtgtcagtgtgtgcagtttatttacttgagtgtaagtcagcagtcctgctcagataagaagaaagcacatgtacagctacaaactattgtttgaaatacccagattgcactgtccagggttataatcaggaggcagaatataattaggcattttagtgtctttttcctggctgtgacttccttataatatgtaagcccattttttactttgttggaccattcaggaaatagggcaggttctactataactttaagagtcatatagaaataaaacttctttgcaaatataaaagacccttccagaactgtgagagtattttctgaaatatattgggagagtacctagcctcttcatgtattaatggctgcacactgtactcattcatatatgttcatttctatcattctttattccacttagatatatatttaatatgttactttaagtctgttaaataaaagctaccctcttcaaacattgttgttagctttctctaacttgcaaagtctcaagtttggaagagaaccaccaaactgggaaaccaacttctaaactgtgaacttttttttcctagccctgttcctaactttgtgagtatagagttgttaagaatgtacttggggctgggtggtggtggagcacgcctttaatcccagcacttgggaggcaaaggcaggcagatttctgagttcaaggccagcctggtctccagagtgagttccaggactgctaggactacaaagagaaaccctgtcttgaaaaaccaaaagagaaaaaaaggaaaaaaaaaggggagagagagagaatatgaatgaatatgaatgtactcgggctggaaagatggctcagcggttaagagtactgactgctcttctgaaggccctgagtttagatcccagcaaccacatggtggctcacaaccatctgtaatgagatctgacaccttcctctggtgtgtctgaagacagctacagtctacttagatataataatgaataaatctttaggccggagtgagtgggaccaaacatctcattttcctagcaaattccaggcaatttatgtgaaattagattttataatactcttatcttctattaatttacaaatgcagtcttttaaaataagttcagagtgagcaaccttcattcacagcaaccacatgatggctcacaaccatcagtacagctacagtgtactcatatacaataaataaataaataaatcttaaaaaaaagaatgtacttaaaataataaggtttttagggaaaacgaattaacatcccacactagattaccattatctctctaattacaatagtatttccagccttttcagtggctggctggtcactgagtaagttgataagcatgcaatgtcttttatacttgctgttacaacattttaattaagagaattcagctgtggcaccagctggggatgtgtctggcattgtggaagatcgtaattagatgctgtatattatatctcctttttcccctttcaactctggtagaatgtctttgagaaggggcttttagtttcggcagtataaatactttaatatgcctaattatgtaatcacacagttatatttctttacacacacatttttttaaatggattctttaattccttttctaatactgaactgtctagcctgctctttggttggaggcaaacatgcattgggcaagaaaaggaggaccagaggcatttagtgattttcctctggttatgctctgtccttttgtctctctactttatggtcttgtccttttatctgaaatgattaacatctcattttcctagcaaattccaggtaatttatgtaaaattagattttataatactcttatcttctattaatttacaaatgcagtcttttaaagtaagttgatttttttcccccagttctgtttcaagtagatgtagagtataagcctgggataggagaatttgacatgcaggcacaataggagcaattgatctctggcattgagcttatgcaaaaagggcctgtcaccccagctgttagagctgggccctgggagcagctgctttctgggatctagtcctctagggatgccctccatctgctgccatggtccaggtcctgggaaagaccttgaccccaactcatctctgtattttactcaccagttccttccggttccttctgtgctgctctgcaaacctgagaagcaagatgattgtactggaaaacttccatgattttcctgttctctccctcttcctcattccacgacactgcacatccaattccactgggaagcacttgtttcaagggtgtatacccctggattcttcaggagaattagcaccataaagcagactttcatttttcacttttatactttagggctggacggatttgtagaactcatttcttggaagaagaacctaagagttcacatttttagtcttgcatttagggccttccctaattttctgaatcaaacaccagcctgacctttctcctactgttttccctcagagtaggcctatcttggcttgaatttgtagcctggttgaggcttctaagtgctgagattagaggtataagctgcaacacccagtttaccagtctgattttctaaatctctatcttttgctggtactggacacatttgttactttccatacacaaaccaccctttttttttttttttttttttttgcgtctctgcctttgcccttatgtccatccacagtgtgttcctcttactctgcttattcttgtcacaaccccttttcctatggtcacaggttctactaaccctcaaattggaactctaatttcttccacctcttcttcattggattaatccttattcaaaacctcttgtatcccatattgatttttgccattgtcacttactagataaaagcccccaagagagtcaggccactgtggttttcatcgctctccctgccttcctccattgcctagcacaggccttggtacttagtaaaactttcaagggagtagatggataaatgcaatccttacatgaactctaaagcttaaaccgacttgagactctttatttgtaaccctggagagactggattctcttcaaggatagatgctgtcttatttactcttaaaaacctagggctgccttggagcatagtactcaacagatgatttctaagtcaatgaaagaattccagtaacaagatgaagacttaatttttttcattgttttctagataaaggttattaaatctagattaaaggatttttgtttattaaatgtagcatttgtttatttgtacacacatggagagtaggggctccatcagataatatctctaaaccaagactgttaaactggccagtccaaaaacaaaaaaacgtctctctagaagctgggtacatggatacacacatactctatgtatgtgtgtatatatataataacatacatacatacatacacacacacacacactataatcctagctacttggcaggttgaggcaggaggaatctcaaggttgactgtatagccaggcctcatcgtaaaaccacaacaaaaacttttccaggacttaagagttgccacagaagggaacagggtcatggtcttcagcctgatttaaaacaaaacaaagctagctgggcataatgatgaatggctttaatcccagcatttaggaggcagaaaccaacctggtctacatagagagctccaagccagccagggatacacggtaagaccctgtctcaaaaatactaagtaagacaggtgtaatggtgcatacctttaattccagctctcaggaagcagaggcaggcagatctctgtgagttcagtgccagccttgtgtacataatgtgttttaggatagccaaggagacatagagagaccctgattcaaaaccgtattaataaataaaacactgaattgaaactattataatttgtcaggttcaaagtttcatagatcagttgcagacgggcataggtgattgtttgatatactgtgtaagtgtgtgtgtgtatgtgtgtatgtatatatgttttgtttggagacaaggtcttactctgtagctcaggccaactttgaaatttctatcagcctcctcaagtactgaaattacagatatatgctacgaggctaggctcacaaattgttgttgtgaagttgctgtatgtgatggtcaaggaactgagacgtagcagagctagactgattataagcaaatcctagacctttcagtaaagatcaggcacttgctttggactttgtatgaacttaaatggctatagttcacagctagcctagtcatcacagcaagtttcaggcagccaaggctacatgatgagaccctgtccttttttttttcccctcccccttaagatttatttatttatttatttatttatttaatagatatatgaatatgctgtagctgtcttcagacacaccagaagagggcatcggatcctactacagatagtgtgagccaccatgtggttgctgggaattgaactcaggacctctgaaaaaagagtcagtgttcttaaccgctgagtcatctctccagcccaagagatgtcttttaaaaaaaaaagaaaagaaagaaacttaagtgggttgaagacatgggtcagtagttaagaacactgttcttgcagatgacccaggtttggttctgagcattccacttcaatggggaaatgttgcctgtctgatgtatgaatgtaggaggcttctatgtacaagcagatacccaaacctttattctccagacaacagcttgtatctgtgtctcttaccccatgtaatacattacagttgggaggaaattttcttgtgctatttgtaatcagggaggttccatgtagcacttaagggcaaatcagagtttgaatccagattccacagtttagtagccacaggatatcaagccattactgaatgtagcagagctttagtttcttagtctgactaaattatcattaagccatccttgtaatgtgggagaattgaataagttcagtgtagcgcctgttgataaatgttaattctttttctcatttttacactgtggaacaacagagattaagtttgctttacatttaaatgtgtgcttcctaaatggatatgtctagactttacatttagatgctagagaaaatgaacctacaactttgacctttatacccaggcctctaactctattttaaactgtggaagccctcagtttgttatcatagttaccctctgaggtaggatggacagagagcagttgtctagggcttcctcctgcaggtggaattctgaaggctacagcataccattagacagcttacttaggaggtagggtctaagagatgggattgagtagccattgctaatgaggaaaaagtaaatgccttgggtttctcttcacctttctctaccaccccaaagtggcacagttatatattatcatacccagaatatcctgattctttagatttgtggttactcttccatcctgggcatagaggagagctatgagctgtgctctgtagctcactgaactgggagactggttgctagcactgcatgagccaggcctaaacctggagtagcaggatgaaggagaatcctctcctgcctgccccttcttttagcagtcataacggtaggaggggggaaggacagagtctagctgccagcctgttctcccctccttcttagctgtgaaaacaaggagagataaaagggtagcagaccatatggaggccatttgtcagccaagtgtagccagagctctacagctaaaaaaggaaatggaaaagggtgcaaagagcaagcaaagaaggagctcccatagtgcttcatttctacccatcccctctaagcatcagggaagttctgaaacagtcttttctttttgtaaagtctttgcccttccttccccattcaaaggtcaaaaataaaggggtttgatttgctctgtgaaagtaagtggggaatgtcttcatgcctattgtatgtgcagcatgatgcaggtgctttcatgaatgcttttaccagttgacttgtcacactcgtagaactaaatgctgctgtcgagtaaggctcaaaggagtcagggcagttgacaggacagagtagacccttaggtcaaacttagattcatttgttccacacttaagaccatgctctgattcccttctggcctgatcctgttaggcaagtagtgtcttttcatgattagctggatactggtttggagaattagagattttctactaagtatttactatcacttcaaattcatgaagcactggggaccaaacatgagcagaacaaattcctatcctatagtgtggacaccgagtggggaaatggaggaagagtgaccctgtggaaaaataaatgcaaaaccagtatgatagtagtttctcaagagagatgaagttgttacgggaatacagaagaaaaataataaagctactacttactaaacagtatataacagaccctgtactgggtacttgtcctatatattgatattaatcttcacagtaactttttcaggtagatacctttgtgtccccttgttttaggaaactggggaataaatcttcataagactatgtaacaggtaacttttaaaggcaacaaacaagctaggcatctaattccgagcccacacaggcaaactcctgatctctggcagtggctggagagatgctcagaagctatagccttatgattctgaagtgcagaggtaggagtttcagctgggtttgtgtgctttaaggtcaggatccttggccaaagataagaacactttattcttaacgactaagggggttttgtggttctctccaggtaacaaggattgccatgttcagtgcaataaaagaaaatgcatttccttctccatcagaggctactggttatgagaagacaggaggcagaggagtccagctctaaaacaaggacagtctcccagagagacctatctgccagttgctgatgtcctagaactgggcttgggttaggcctttctggggaagatgatgtgtgctgcagggaaacagcctaggcctgtgtggttcctctctctgctctcccatcccagcacagtaccacaccctgagaaagacttgagctatggcagactggccctacccccagcgcgtgggaagttcttctaagaaaagagattctggctggacaatggccttcctgtctgctgctgggaaggtttgtttcctatgagaaggttgcaaatggcatgagacatcatcttgattctctcccatgcagcctgttttagacttttgactactcaagtggtgactggtaatgcaaaaggccaggagacccattcagaagcagccctggtgtcttctaagtaataatattgctgtccattgaaggagctctttcctgcacggacacaagattgctgtcagcctttcatactctgaggtcagtttaaaaccacatagctgtaggattttcaaaagtgaacctctcaaaaagctgttgaggctagccacatacacatttgacttcagacagatttttcagagtgacttcagatgtattttagtttagtgatgacataagtgtttgcttacagtatccaggttgtccttgttgctggactcactgagacacctatgacctggtgaggtttggaagagaagctaggctctgagaccctctgatatgttgcaccacccttgccttctgggtagcattgaacctctaagtatcttaacctctctttcttaatttgctcgtctgtatctctattgtgtttggagagtatattgagaggggggagggggaaatgtatatattgggaaacatagggagttccacatgtaaactgtaaactgcttagagtagtgcttggcatatatcagtaagcatgaactgttaagactctgcttttgaaggagagtcttcaaagaagcctttgaccannnnnnnnnnnnnnnnnnnnnnnnnnnnnnnnnnnnnnnnnnnnnnnnnnnnnnnnnnnnnnnnnnnnnnnnnnnnnnnnnnnnnnnnnnnnnnnnnnnnnnnnnnnnnnnnnnnnnnnnnnnnnnnnnnnnnnnnnnnnnnnnnnnnccctctctccctccctccctttatatttgtaatgctctaattctaacttgtttgggatacttttcaccttctctttgaacaaggtatggacaggtccaccttggagaaaatcactcaactcaaatgaacgagcctccttgtcctaatgtgaaatggttcatgtagaaggaactcaggaaagtggtgcatctaggagctgtgtacactacctacatacaaaaaaaccacgtgaacaagtttactttctgtaatccccttgtcttttctctggctctgttgttaacaaactggaactagaaattgaacctttttatcaagaaagagttttacagtgagtaaatgtccctcttctaaataaccttaaagggtcctctgctaaatggtggggtttttacctgcctgcctgcctgcctgccttccttctttctttctttttttctttttttttttttttttggacaaagccttactgtgtagcctagactgttcttgaacccagaatcctcctgatgctagaattataggagtgaggtaccacacctagttatgtctcatgctctatcatgtagatctttctgtttttggatccacaaacctatcttccaatacttccaagaactcttcacaaagactgctgaccattaacagtagcctttactagccctatgttatttagctttctgttattgtgaagaaaaaaaaaataaccaagaaaagcaactttaaaaagaggaaaggagtttattttggctaccttttccgcccagtcacttgagcccgtagcaaagcagaacatcatggtagaacacatgatgacacagagctggctttacctagagttagccaagtaaaggacagatgggagtagagtgagggaaggggaggaaagaggacatactgtgaacaggccaaggaattaggactgtaggctctattcagtgtcatgctctgccttagtgtgatctttatagccctccttaaagacatgtggaaaggactcgctctaattgtttgctggaattatagccaggtaggacaattacagtactatttcagctccgctccagtgaccacctctctagaactgatgcttgggcctgggaccctctttttctcccctcccctactctcagtccttaggagagtttctctctggccatcttgtcagcaccttcattaaacacattttttttttaaagattgatatttacttatgtatttatattatttatatgagtgttttgcatctgtatatgtgttttgaaccctgcagctcctgtctttgacagtgtggtcttttctttgtagctgttagccagaaacctcttttgttaagtcttttgaaagtatactagatatttaaatatatgcctgcctacaaacctccaatcccttagagactggagcctgtatacccctattttctataacttatacttgttttgaaagagttgggtatctttggagggagctgagtgaccagagcagaataagacatctgtcttttcattgtacatgttatttttagctctataccacatatatactgatatcctatgtatttatggggtttacaagggaagaaaatgtgtagcagagtaggcttggctctagaattctagccctttctctgagatcctcttccatgtgtactggcctgcttctgtgtgggtcctgcctgctttcaggagctggccagactgttcagtattaattatgccaaggaaatgaaccagttagacacagtctatagagcgccaagagtcagtcagaaggtctgagggacttactactcaatggacggaaaatgaaaaatgaaatagtaaagcaactgtttgcttgccagctgtctgaatgatttggccaccacttagggaactacagcaatattttcactcacttctctcctgtttaggactttgagccaggtgggtggcagggatgtcagaggtgtatcctttaaggggacaaggactcatacttgcattcatcttctggtgtcatagtttctgctggacttttagatcctttggcaacttttaaaaaattgctgagctgaaacagtagctcagcggggaatgtatactactatgtgtgaggtcctggggttgatctgcagtactgccgaaggatcaaataaagggaaagtgaggggggcatttgggatagcattggaaatgtaaatgaagaaaatacctaataaaagtaaataaaaaaaatatttattaaaaaaaaaaggagccgggtgtggtagcgcatgcttttaatcccagcacttgggaggcagaggcagaggcaggcggatttctgagttcgaggccagtctggtctacaaagtaagttccaggacagccaggactatacagagaaaccctgtctcgaaaaaccaaaccaaaaaaaaaaaaaaaaaaaaaaaggaaagtgaatgaaattgtctctgatggcatgctgtctagccagcatggataagtccctaattcagtcccaaacacctgcccaaaaacagttataaccgcacttaaatgatgaaacaaaagaaaatggcatattttctacctacctctagggatgtgcaacctgagggcaggattgttttccatctgacactttcccccagccagacttgatattaactgcataatagcatctgggtcaggtgggaggctgcaagggcacagctacagaatgtggtccatgggatgttcacatgggaagaagccagggccttttcctgctagtcagacacgcctgtgtgattcccagtcacttggagctgttagaggaagtgagaagaggaaatggccattctgatcccacatagatggatgatgtctctgtgatacgagggacaggctggcaaggagtcagcaagatgaatttcctttggaaaaagctttgttgtatcttgtgattataaaagatttggaaagttggaggtaatgagtgcctgatcatgttgccttcgccaggctagactttagtgactccttagtgcccccattgactaggcaagggtagctagacacaccaccttgtattgcctggcttgggattcagttctataatctgtctgaaatagaaatagttttccatctcctaagagctgcttggtccttccagctcctgtgacaccctttctaaaccaacatcctaccacacctgtttgccatctctttagttaaccaatttgaggtggtgaaaggaagtgatcttggtatacataaatttataaaccgatcagctcatgggatagggattaggactcaggggaagaagagctggggttagaatcaaagggcctgactctggtcccaggttgactgccccctgcctgccccaatcttggctaaaagttgcttcacttttgcaggacttagtatcctcatcattagagggaagagatgataactatctcacagaatcctaaaagatgatgatgactttaaaactagattgtcatacctagagggaaaatgtgggataaaggcaagtgacgcctagcagacaaaagaagatgcacaggactttggaagcctcccaggaaagctctctgagatcttcacagaagccaaactcatccagggagtctttcctggaattgatgttgtaaacagcctaaaacttagcctagtgagttgcccgtactttatcccacagtctgactcactgttagtggatgctgttagaatcaagtgcaaattacagcaggtacagaacttttctggagtctgctggccattggtagggagagaaatactgtgggcaaccagactgaccaattgctggtacatttccctcaccgtcagtgacaactggaattccacactagttcagtaggctttcccaaggacgggtctatgtccctttgtgatttggggccatgctactaagacaagatacccatttgaaagtctcattgtagtaccatctccctctgtctttgcagtgtgtcctctgcccccagagccagagaatggtggctacatttgccacccccggccttgtaaagaccccttgacagcaggcagtgtcatcgagtacctgtgtgcagaaggctacatgttgaagggtgactacaaatacctgacctgcaaaaatggcgagtggacgccagccatggaggttagctgtcatctcattgaaggtcagtctgcagataaaaacgggtgctgcctgggttctgctttttccctggctcctggggagtagcacatgctttctcgagagctctcttaggctgtgttaaaagccatttggcctctcagcctctgtggtaattccatgtcttgtggaagtccttgggtttgctggcgcatgccatgttgcatttactctgaaccattgaggggctctgtttctttattgaggcatctgcttgactgtgtaaaactcctctgaggtcaggatttctgtttgactaatcaggtgctgatacccttaggctgggctctgctagcgcagagagcagtgagcatagcacgaacacattttccggtgtctcttccatttcattttttcccttaaagagtcctttttccttcctgcctcctcttgtcttacatgacaggaaaatgcaggttcctaaagggaagtgtgtgtcgcagagccatctctgtgcttcattcacagttgggcttcaagaccagaacacgcttaaccagtgagacctcggaggccgtgggaactgtaggcctagattttttaaatctatttttaataagggtttttaaatgttttaatgtcccttctagcccatcgcccacctgaggtagtggaaagaaaggttaatagagcaaaggaggatatggacctttttaaaaatacttctttggagcaaatctaatcttgtgttgtcaggagatcaacagtaaagttcacacaaattagtagcaactcaatccatttgcaaacaccatttacaaatcagcaacagcaggactcataaacatcatttatgaactagctacagcatgccaatctagaagaaagcacaagtctctatcagttggcccaagtcctctgaaatgggaagaagccacggaaataccaccagaagttttttggtgtgtttctctctatgaagtcatgacaaatgatgaccaataaagaatgatcaggtaccaataccacccagagttgtcagtgaaagccagtgtcgaccagcaaagagtggcaaggccaccaaaccatagagcaccatccactgtcaaacatcacgtcttctttcaaccatctgctctagcaaaataccataatgccctttttctgggctgcctacagaaagacaccacgtgtctgcttcagaatatggtggaactcaaggtggtagaaaaatgtggcccttttgatggttgaaattcaccagctagctagtgagtttagataccagatggacttcaaaggctagaatgaggaggggtcttttattcaggaaaaggaaatgtttctaaaacaccatacatgcataaggccactttataagatttccctaaaaaggcccagctgtcaaataaatgcaggggataattaactatttcatttgtagagttcatgttttgtgtttatgatgtgcttatgatggcttgttttcttagacaaagaaacccatgcacttggggtccctgcgctgtccatagtggcttccactgccagctctgtggcactcattctcctcctcgtggtgctgtttgtactgctgcagccaaagctgaagtctttccatcatagcaggtgagttagtcaagcatccccatgatgtcaacctgggaccagttataagaagctactagtttatagcttctgctagtctgtatctttgggaagtagagaggagggtccagttgtgtgttaaactcatgcatgtgactggcactgcccttttagggtgcacattctttactttgattcttttgggaacattacaggcaaagaaactgagacattcaaataatatctcagaatgactgcagaattgagatttgaacctacacatctgttcaatctcaaagacgtggcttttctgtctcatccctgtctctggtgtttccagcagcatcggcaccactcctgagatgctttggagcttagacacagtaatagaaagtacagccctctgcgtggtgctgatacatgcttgtgtttgtaagctacctcttcttgctcctggcttctaatccttagtgcacctcagcttccctcctatcctcatgtatttggtttgaagtaggatcctggtcttatcattttttagaaagcttctcagatagttatgatgtgcagtgagaatccaggacatgataccattgtgaaattagaaggagtgggttttcttgtctacatattctcctttttctcttatagtacattgtctgttgtttatcatcccagccttgggagatgggggtggcagatggtgggcccctggtgggagtgaccctgagtatatctctgataagagacttttttcctgacctgccttggcttctgtagttgcttaaccattatgggtacttcatgcctttgaagaatatagatcgtttatattcattcatagccctacatcagtcattgtcttagctctcaggaacagctgtccagactaaaccacattctgtaaaatgctccagatgtgaaacttatagacgtagactaccctgaagtgaatttctatacaggaaggagatttttcctttctccttttttgtttggaaggaaggaggagtaacaatttttttttaaaagatatatttgttaattttgtgagtgctctatctgcatttacacctacacaccagaagagggcattagatcccagtatagatagttatgagccactatgtggttgctgggaattgaactaaggacctctggaagaataaacgatgttcttaactactgagccatctctccagcccagtaacaattgttttgaaagtgatattttgaagggaactatttatttgaaaacagtgagctatttccatggcaagtcacactattctaatctgttttcccatctaggctaggcagtttaattttctctgtaaccagtgaatctgttaaaagtaaccagttgagccgggcgtggtggtgcacgcctttaatcccagcactcgggaggcagaggcaggtggatttctgagttcgaggccagcctggtctacaaagtgagttccaggacagccggagctatacagagaaaccctgtctcgaaaaaccaaaaaaaaaaaaaaagtaaccagttgattcttttttgcttaagtataaaattgattgggtttgtctgagtaccaaatgcatgttacaagcactactttaaaaaaatataccatccgggcagtggtggcacacactttcaatcccagcactcaggaggcagaggcaggtaaatcttttgagttcaaggccagccttgaaatttctttcccatccaaaaatctctggttattttagggatgctaattttctttattacatatattatttgagttgggcaatatagattgtgtctgccaagtacaggaaaagaaagttacccactgagcagtggtagtataagctgacatctgacactgtgcctctcagagtgatagatagatgaaagaacacatcctcatctatgtagagctctttatgaaatttaacctaaatttagttatatataagaatatataaatacacatatctaagttggtgggtcatcctattagaaagctggcatggacatttcaaaactgtcagggtcaaggctggagagataactcagcagttgagagcactgactactcttctagaggtgctgggttcgattcctaacatccacatgatggcttacagacatctctaactccagttccaagatacctaacaccttattctggcccctgggggtgttgcacccatgtggcatatagaacagccatgcacaagatatttttaattttttaaaatgtctgtgtataaaataaaactagtgaatattctaagtaattctaaattaatggaaatgaaagggacaggacaactaggcatagagtgtatgtgtcatagtttgggttacttgctgtgatgaaacaccatgaccaaaagcaagttggagaagggtttacacttccccatctgtcttagggttccgttgctatgaagagacaccatgaccaaggcaactcttataaaggacagcatttaattggggctaatttacagtttcagaggtttagtccattatcatcaaggcagaaagcatgccatgcattcaggcaaatgtggtgctggagaaggagctgagagctctgtatcttgattcataagcacccaggagtgactgggttctaagcagctaggaggagggtctcaaagcccacccccacagtgacacacttccttcaacaaaggtcatatttaataaggccatacctcctaatgtgccactctctgagtcaagtatattcaaaccataacatccatagttcatcactgaaggaggtccggagaggatttcaaacagggcaggaacctggaaacaggagctgatgcagatggaagattgctgcttaatggctagcttaacctactttcttataagtaaaacccagcaccatcagcctagggatgaccccacacacaacgggctagaccttccctcatcaatcactaattacccgcttcctaactacccagtctatggaggcatttttttcaagtggggatcccttttctcctatgcctctagcctgtgttaagttgacataaaattagtcagcattgtttgtttgattctggataaaaacaacagagccacagtggataagtttgcagacagtttgggaagtctgtattaacacaccattgttaagtttctggaatacagtgttatagctgcatgggaaaagaagtcctgaggctaatacaaattatgggatggatgtgcagtatctaggctacagttttgacctcagcaggagtatatacaccagtgtcaccgctagactatgcagggggctttatgtagacttggccacatgttctttcctgcatttgtgttaaaattcttttttaaaggacagattcttcttatgtagaccagattgtcccaaaactcctatatctgcctcccaagtgctgggattaaaagcatgtgtcacaaggcccagcagcgtgttctgttttacttatgtatatgggtgttttgcctacatgtatgtctgtgcatgatatatgtgcctgtacgtactgagactagaagagcatatgggattctttagaattggagttacaggtggttgagcactgctgtgtggatactgggaatcaaaccgcgagtcctttagaagagcagccagcactctcaaccaccgctttccatcccttccaaccccaagaacacagtcttttgaagtatgtaaaactggaatcaatcccaagtccactcctgaccagctttgtgacagttgagcagttccttaactcctctgagccaagcctgtgtttttggtgaaaccctaggtggaagggttcaggtgagggtccagtgtacttagtgtttaaagtaccttgtacttactggcatataataagtgctgggaaatgatgagttttgttgatacaacatcatttattcaactctgtgttactcaggttcttcttttgttcttttcttttctgatccaggcgtgaacagggggtttctggggatcaagtctccattatggtggatggtgtccaggttgcactaccttcatatgaggaagctgtgtatggaagttctggtcactgcatgccaccagctgatcccagagtacagattgttctgtcggaagggtctgcacctagtgggaggaacatgccaagggaacagcagctgcaaggccaggaggcctgctcttctgcaggtggagaggacgaggccccgggccattctgggctgtgtgaagcctggggttcccagggctcagagactgtgatggtgcatcaggcaaccacatcttcctgggtggccggctcagggagcagccggccgacacacaaagacactgcagattcagaaaacagtgacatacaaagccttttatccctcacatcagaggagtacacagatggtaagtggtctttgctaaatacaaattactagctgttagaatccttactgggagtgaggaagctctgtgggccactctaacaatttggtgtattttcaggaagtgagagctaatagagtgttagcctacaaagtaggacttggtcctcagaatgccaggtagagctttgggctcttttcattgttatctgtgacttctgatggctgtcagactattcatagccataggctctgctaaaccaactggatggggttcagggtataggactgttaaaaagttttatgttcatgaaaggcagaaaataagagcctggtgtggtggcgcacgcctttaatcccagcacttgggaggcagagacggagatttctgagttcgaggccagcctggtctacagagtgagttccaggacagccagggctacacagagaaaccctgtctcaaaaacaaaaaacaaaaacaaaacaaaaaaaaaacaaaagaaagaaaggcagaaaataggagaccttggtggtactgcagagaaaacagtagtctgcttatcttatagagaagacagctgcttcattctacacagaagtatactgctggtttccttgtgttgtccattgcagtcaagctggcagttaagtgagtggtagaaatttatgactgtccccattttacagatggaaaatatgggacctagtttcacttgtcttttctccactggtaattgacaggtgagatttaaaactaaatgactgtggctctaaaccagcattcttaaccttacagtgccatattgactcctagataactagttccttttgtgtcaaagtgaccatggagtacagtggttacttattggcagtcttcctttgccagagcatggagagtgtaactataatttgaagcagtcactttaaagaatatctgtaggtgaaatcccagtgtagttcctgattcagacaaaacctagaagcttcatgttgactgtaacactctgccttcataatgcctttctgaaggagcccagaggatggaggccatgtctaacactttgaaatgtgtctgtcagtagcttgccgccttttctctttcttggagagagatgacaaggatgctgtaagtaactgacccagtttggatgcggcattcagttacctctggaccgttaggcatgtattttatgaaatctggctaagggcacataggttcccagctctttcttgatggctacttatttgtttagtaaacaagtttttggtttgggagctgttgttgtagttgttgatgatgttgatgttttcagagtcagggctcctgcatagcccaggctggctcagagactactatcctgttaccctagccacaagtggctgattgcaggtgttactgtgtaaccttggctatctgaaactcactgtgtaaatgagaactggtctcaaaactcccagagattgctctgcttctgcctctaattaaaagtattctgctggaattaaaagtatgttccattacacctggtctgagcaaaactttttgaaagccatatcttgtgtttggtgctggatgaggtttcagatctgatgcaaataggaagtactctctctgttgcaaggagtatcagtaggaaagtcagtgaggcctgcactagagaaataatggaatcaataattgtggtgctagccagatatggtgcctcaggcctgcagtcagcatttcagaggttaagacaaggaccacagtcaagggtagtttggactgcacagaccccggctctcaaatacagaaataaggccagcaagatgactcagcagagagaggcgcttgctaccaagcctgatgatctgaatttggtccccagtccccacatggtagaatgggagagctgactcccagaagttgttctctgacctgcaggtatagatgcacgtcatcaagtagttcctgtagtgtgtggatgtacacatgttaaaaggaatgataaatatataatgaagtttttaaaagtacaataatgaaaagaaattgaactcatgccatgatgaggacaccagtgttgttaagacagattccagatcttaaagcatgggtctagcacttctcccctctggtgacatgagaagaccaaaacccactggtttggtccaaaatgatttgtccaggttcacacagatgacaggtagcttttttaaaaaggtagaacttaaagagaactttgaaacttcttagagcaaggttagaaaagaatcaaaagttactagaccagcagagaacagaatcagggttatgttggtgggaccagaaggtgtttggataccaggcttagcattgggattttatcgtacaggcagtgggagaatagaagcagaaaggccagaaatagaaagcaggaaaatttgactagcttagacatgtacagcagaacgttttatttctttaaatgagcgctgtttgggactctctagggtggagttggaagagatactgagagacacccttaggtaactgctgtacttccctccctgtctctacagatatcccactattgaaagaagcatgagggctgccgctggcctctgtcctctctgcccgtcctctctcttcctgtgggtttgagtaccatgtcctctctagctgccccacctggatgcctgaactgccacctgtgtatctctgtgtacctgagagcctgcaggccacctcgatggatactcaagaaagattctcaccatctgcccactggacagctggaggacctggccctttgcctggcccagccttcccatctgtctgtcagggatgtgtctgaatgcgctggattgaacctccccttcccctcagcctctgggtcccttccagccagctcttggtggcagccccgcagccatgagggcctgagcactgctgtgtttacttgtgccttccccaccctgtccaggttccctgttgtgcaggtgggttgctatccacaggccttagtggctactgccacctgtacccgggggccaggcctgaggctgcagaaacagattgaagagtagtaaggcactcaaagcaggaatagctcatgctgggtccagaatgtgggtccctgagcttgccctgtgtgttgacactgatggcggcatcttccttaactgaggacagaggtttgggaagtcatgccaaagccacccagcactcgctgaccagctctcgtgcaggttcctggctcttttgagagtttctaagaagcacccagaagacctgtgggaaggaggaaaggtgtcagataatgattgtcttcctaatactcaagttctcacttcctgcttccagcactggctgccttggccttggtttctgttcctggataaggggaagttgcatgctgtttcctggactttgtcctaggtagctctggcttccttgcagcccacagaatcctgagatttgctgagatgccaacaaaagctcatctggcttttggcagtctgggcaagttgcccctttttaggtttgtggtgatggaggggaggctgataggtacagaccaagtccccggtggctgcaggcagctccggcaggtcctgaggatcctcctcaccacggtcatgtgccttagtaactgtgcccaggaagtggcctgctgtgccactgctcccactctgttctctcctccctgcctttccacacgtcatcgttgaaaagccactccttattttccctgccagctgatagagatggtgggcacccagaaacctgagatacaggtcctgggagtgggaacgtactagcctagaagaaatgctccagccatttccagcctcctattgccctgtactgaatgctgacaagtctgggtaactgagccccaccaggcttctaccatcttgagaagacagatgtggtatcaaggaatgtgtgtgttttttttttttcttctcatctttcttcctttcttccttttcttcctcttcttcttcttcttctttctcctcctcaagccttggggctgggaaactcttcagagccagtcctggactgaacctgtgatgagcctctctggggtggtaaaaataataaaagcccagtatatttatagttcctgacacaacagggttagctccaggcatctgtggcctcaaaaataggggaataacttctcctagccaactgcctccattcacaatgcactttagtccctgtcatgcctggcttcctgacaccctcatctcctctcagggtaagggcagtgtctgctgtccctgctggccactcccacactaacccaggaggccagtccagtgtgcccagtgtccagacaagtatggttggctgaggaatgagctggaaaaggtgcttagactagacgactagaacacccctagcaggtgctgccataggcttacctgggggtgggttccaaggccccaagccacctcaccatggcgcttcttcagcttcagtggtgtccacccccctcaagggagaactgggcaaggaacacgagtcttctgaatgggcctgcctcttttgcttactgctcttctaaaatctgagttctgttttagttctgtgtcgttaccctgggcttttgccccttacagattgcacttctttggcttattatttagccttgtaggtgcctggctttggccttgggaaaaagaacctcctggtgcctcgttttctctcagcattcattagcctgctgtggggaaatcacaggcccaggcttgcctaactgaaggataaagggcacccgtgttccccatcctcttgtcacaggcttttagaaggtctgttcttgaggtctcacacctgttgctggcatctgtggcttcttcctgcattgttttcttctacagcaatttcttaaccattagccatgtgctgtggtttctggggcatctgggctttgtccattacagacggactggggacttaattgccttgaagtggagcctgctagaaacagggtcagtggcaggtggcaggcggatgggcaggaagaagcttcgagcaagtgggaagaaactaagcagcctactttactgggctcacctccagggacatcctgagacttgtccaaaagaggcagtcagcaccaaaggacttttacacagggttttttggtttgggagatgtttttgctttttcatacttacactgactcaatgcaggttttatatcctggtgacttgctgtcacattctatcagttttcaagggccagaatgatgaaataaataaatagaaaattccgtccttccatgccttagtttaacaggtgagctctacctgcccagttctgtgttttgtgtgagaactgtgaaatgggcggagtcctgaccactttgtgggttcgtttggttttataaggcatttcaatgtacattcttcaagcactccatttgcaaagagaacttaaagtcatactgtcttccccattcatcctgccctccttgcacccccagctttacagttctgtaaagaagccaggctacaagacagacaaaggtatatttttcctgctttgagagtggccaagttgggatagatggcagttggcctttttcctcccagtcctatcagagctcttgagtcacttggcttcctgcataacaatatctcctctgttctgaggaacattctagcatagaaaatggaatatgctgcaaacatttctagatccttcctcccttccccctccttaaagaacaaagaagggacacacagcatgcctaccacacagcttcattccaggtatgcttgcgcctgacagtacagctagagccttctctgtggggcctgctgggtctcctgcagccttagagaatattttacttggcattttactaggcagttgaaaacctagtagagtttgaacaaagcgcaccccaccccacccgtccttcacccagcagcagagctcaccatgagggtgcagagtagagcacttggattgccaagtagggagaggaagtagttgagggttgcatggctgtatccacactggcctggcttcttaaggctgtgcaccactatgggatcctttgcagaatggtactcataaaatggtttaaacaacacatgcttaattgactgtgcaggatgtcaatcaatctgggtttgctttattttattttatatatatattttttggtatcctgtacattgcagtgggtatgaagatagtattttaatatttgtacaaagtttaatttaattttaattgttctatgtatataactgcatttctaaataataataaaaattcttatgaaggcagatgtgagatgtagtccttcccaaaaatagtttttcagaactctagatgattgaagagagtaggtgttggggttaaggctatatgtgctagcttggcatgtgtgagaccctaggttcagtctccagcaccacagaaggaagaggaggagagaggcggctcagttggtagagtgtttgcaagcgtgaggacctgagttcgtatccccagaactcacacaaatcgctgggtgtggtggtatgttcctgaaatgaggacagactcaggaatttgctggccagccagcctccataattagctccaggttcatagtccttattcaggaaaagataaagttggacagcaatagagtgccatcctttggcctctgcttgtgtatccacacacatacactgtacacacacaaagagtggaagcaggcaagagctcatgactagaggatgctctaggtctgaagaggctgcttggcaggtatggagacgggacagattcagaaagtgctcattaagaacatagaaccgacagttgggtgattgattggatcaggggccatcttgggggtgcacagatcattgagggcagtgcagagggagggtgacctgggagaaggactaccaactatcaccagtagaaaaccattgtctcttgatcaactgctttcctctcggggtgccaaacacttgagcatctgatcctaatatggttgggctaatgtagaatgtcagttgggccaggaggggagacaattaacaagtgcatcatgattgatataatctggaacctagaagaagatgggatggggcattccaagccttcagatgaaacacagctaggtgtgtgaaggaccggtaccatgagcctagacaggctgagcatggtgcagtctgtgtctgggcacaaaggacagcgcgtgtgtatggtacatgcagtatagaaagttgcatactaggcagtggaaaaaggaaaaaggagagagaaagaacttgctcctgaatttgaggagacagtgacttggaccacaaggaggtaatatggagaatggggagtctccacagcccactagggatgtttgcacaccctatgggcatggacatcaccttggcaggtctcagttaatgccatagcattaactaaaattgaaggggttaggggatggactctgactgcatctaaaggatggatgtagggatataagaccctagtgagctgggtggatgacaataggatctctaggaagatggctgttgggatagaagttggtaaattcagtcagtacttttaacacagagctgttaggtgactggatgcagggggaaacacatctcaggggtacacagatcactgccagcagtacagaggaaagctagacagaactgtaggaagaccaggagtgtgttgtatgcctttaatgtcacccttcagaagcagaagcaagattgggggttcaaggccagccatgactacagtgagaccctgccattaaaaggggggagaggtatgtaggtcaatggaacagcacttccctggcatcatcaaaggcctcagaagtttgaaccctagcaccacaaggaaagatgtatttaaggaagaaggcagtgaggactgaattaaaaacaattgggagtggtggtgcacacagatctctgacctacatagcaaattccaggccagccggggatgcatagtgaaatactaatgacaagcggggcagttgtggcgcacacctttaatcctaacacttgggaggccaaggcagaggcaggtggatttctgggtttgaggccaccctggtctacagagtgagttccaggacagccagggctacacagagaaaccctgtctcggaaagaaaaaaaaaatactaatgatggtagataagtagatagactgattgattaagtgataatggagaacagatcacaagacaaagaagacaggaacttaggtgtggtggagatgtgtttgaaagagtcaaactcaaaatacagcaacagagtttctatggagtgcattctgggctcagtctgcacttccctagtccctagcaacttactggactgaggcaggggtaggagtagtggcatgatggtgaacgtgagctttataaataaagaaatgggcttaagagtgtaaatgctggggtagtgggatcataggttcaaggctaggttgggctgtatagcaagagactgtctaaaacaacaaaaccccaaatcagggtgattggtctaggaagcacagaatcttaggttctgtccccagtactacaataatggttaatagcaatcaaaaagtgcgttattataaagtcacactgctatgaaatggtagaaactagaattcaaatctgtcttccagccttcattcttaatatatgccccagggagctctgcctataaccccaagttacctcaggatgcaagaacagaaaaccattcaaactagctctaccaagagagcttgaaggttgtttccccagccccctggaacttagtgtccaagggaagacaaagcacagatggtacagtggccatttgcttctcagttctgcagttgaagatacagagctgtcctgctaatgtgtcttctggccacctggtagcagagcaggaatggagctgagtgctagagtatgtttctgtcccacaccctcagtaagtctgcatttctgcttggtttttttttttttttttttttttgggtttttggtttttcgagacagggtttctctgtgaagccctggctgtcctggaactcactctgtttgaggctagcctgcctctgcctccccagtgctgggattaaaggcatgtgccaccgcgccaggctaacttttttttaattgagaaaaaaacttggatacaatgtatttttatcatgtccaccctactcctcccagatcctagtttctctacccacccaactttaagttctctcttgctcgctctctttccctccttctccctccccctccccctccctcccctttcctccctctttctccctcgatccatttcccatgtgtcctgggccagccagcctcttcctctctcctctacccccttccccagatcctcttcccttcctgccaaaaaaaatcgtccttccactaggcctgtcatatgactgattcctctgagggaatcaccttgccctgctctctgaggtgctccctcctcccgcatgacaccactgccgtttatcaaacacaacacttaagatctttctgcctcctctaatgcatagatccctgagtgggagagggcggtgctggggggagcagtgatgccgtcatcccacttaggattgagtgctccaaaggttttcactttatcaaagtggctttgggaagggcttggctttgccccagcagtcaatatggttcctggtcctaggagagccaagtgagctgggagccatcctgcagcccctgttctctttgttcccaaaaaccttggacatagaataagcagccaaaggggaatatgaacagcccaccccactgtggagttggtggcctgccttctcaactagcccagagaagaaaaacataatcgccaggtcccacccatgcagtgaagaagtgaatcccaccagggactgctgtgttttnnnnnnnnnnnnnnnnnnnnnnnnnnnnnnnnnnnnnnnnnnnnnnnnnnnnnnnnnnnnnnnnnnnnnnnnnnnnnnnnnnnnnnnnnnnnnnnnnnnnnnnnnnnnnnnnnnnnnnnnnnnnnnnnnnnnnnnnnnnnnnnnnnnnnnnnnnnnnnnnnnnnnnnnnnnnnnnnnnnnnnnnnnnnnnnnnnnnnnnnnnnnnnnnnnnnnnnnnnnnnnnnnnnnnnnnnnnnnnnnnnnnnnnnnnnnnnnnnnnnnnnnnnnnnnnnnnnnnnnnnnnnnnnnnnnnnnnnnnnnnnnnnnnnnnnnnnnnnnnnnnnnnnnnnnnnnnnnnnnnnnnnnnnnnnnnnnnnnnnnnnnnnnnnnnnnnnnnnnnnnnnnnnnnnnnnnnnnnnnnnnnnnnnnnnnnnnnnnnnnnnnnnnnnnnnnnnnnnnnnnnnnnnnnnnnnnnnnnnnnnnnnnnnnnnnnnnnnnnnnnnnnnnnnnnnnnnnnnnnnnnnnnnnnnnnnnnnnnnnnnnnnnnnnnnnnnnnnnnnnnnnnnnnnnnnnnnnnnnnnnnnnnnnnnnnnnnnnnnnnnnnnnnnnnnnnnnnnnnnnnnnnnnnnnnnnnnnnnnnnnnnnnnnnnnnnnnnnnnnnnnnnnnnnnccactgctttggtcttactttctggggaatacctcccccagcacctggccctagtctaagtattatcctggccaaaatttcctcccaagagttcccgaggccatcccatgtaaagctgagcccccggtctccctcccaccccccccccatccctggtgtggctttgcccgagcagttggcacaatgagccaccctgcaactcctgtctgcccctggcccagaggaattgtgtcttgcagcttttcttcaggaaatagtgctggggcatttccagggttttccctttcattgttaaatgagatactatttgactgtgagcttgttttgggatggtacacattcctgagctgggcttggttctcctgcaagttgtttgcgaacattataaaaccacaagaaagtcccatcccatgccctggaggggaacagctgcctggttttctggacttcccctgacacccctgtgtcctgggaaaaggaaatttcgcaacttggatgtggccccagcagtctgcgggggcagcttagactttataagtctgagatagcggttgggtctaggcttctcaacttagtcctgcaaggcagaaggtctggcaagtgtggacatctccccagaggaacttcccttggggaataacagtgtgacctccagtgaagacagcttgtttgtagatgaagcctgccagctgagctcaacatctggagagtcgggggaaggggagggggcatgtgaaacaagttctttggttcagcacaaacacatcaggcatatgctgcctcatttcggggtggggatgggggtggggcactggtttcctgaagcccttgagtggctgttctcagagactaggtgggactttacgccaccgccactctagcggatggccgcttcctacctctgctccagtcatttcagagctcattccgttttgaatgtgttcagtaaactattatctggcatcacacaaagtctgatactagcttctcagaaggcagtggtgagtgagactcagtttacccctcaaagcatgtgtacagtggggaagagggctttacaaagaagaccacggtaaggatggaaagctgtaaagaccaattggcagagtggctgcggagtgaagaggtgggtcggtgctgtgggggaggagcatagtgtcccccatgaaagaagatgcctcttgctttgtgtcttagagaataaattatggtttaatacttttcacggagaagtgagcaaggggctattgagcaaaatgggaagaggagggtctttcaggttatagacatccacaggaataagaagtgagtaaataagtagcaaattctaaagtgaggaacataaaaaaattattgttcctcctccttttctctctctctttctctctctttctctctctttctctctctctctctctctctctctctctctctctctctctctctctctcttcctcctcctcctcctcttccccnnnnnnnnnnnnnnnnnnnnnnnnnnnnnnnnnnnnnnnnnnnnnnnnnnnnnnnnnnnnnnnnnnnnnnnnnnnnnnnnnnnnnnnnnnnnnnnnnnnnnnnnnnnnnnnnnnnnnnnnnnnnnnnnnnnnnnnnnnnnnnnnnnnnnnnnnnnnnnnnnnnnnnnnnnnnnnnnnnnnnnnnnnnnnnnnnnnnnnnnnnnnnnnnnnnnnnnnnnnnnnnnnnnnnnnnnnnnnnnnnnnnnnnnnnnnnnnnnnnnnnnnnnnnnnnnnnnnnnnnnnnnnnnnnnnnnnnnnnnnnnnnnnnnnnnnnnnnnnnnnnnnnnnnnnnnnnnnnnnnnnnnnnnnnnnnnnnnnnnnnnnnnnnnnnnnnnnnnnnnnnnnnnnnnnnnnnnnnnnnnnnnnnnnnnnnnnnnnnnnnnnnnnnnnnnnnnnnnnnnnnnnnnnnnnnnnnnnnnnnnnnnnnnnnnnnnnnnnnnnnnnnnnnnnnnnnnnnnnnnnnnnnnnnnnnnnnnnnnnnnnnactggcttctctctctgcagatggaggcatttgaggtgtccagtacaggccctgctttctctttggctgggacaacacagggtgcatgcactgcctgagagtgacttcctgtcagcaacaaccaggcagctagctactcaaagttaaaaattaaactgtttaccgtttttcttagtgatttccagaaatgagggggcgggaatcaagccctgtggccccaggtctgtaatcctatctactcagaaagcggaggcaggaggattggaaactcaaggcctgcctgagctcccaactcggttttaacccaacacggctaacttaccaaaaccctgtagaaacatagctcagcggcagagtgattgatgccttccatgcacgaggccccaggttcaaacaccagtgctgagccaaaaggggtgatagtgaacctggagggacaacactgaaccccactggggacagtacttccacccagtcacaacgttcttcttgtccatttctatttttcattggaggcatccagaaacggtcaagctatttaataatagtggccatgaaagcatcaggagttatatctctggcctgctaggttgatggaagacacaaggaaaacaagagtaaaattggaaatattccttgtggaaagtaatttgacgacagccattaaaattacaacatagatccttatcctcgctccttctctcaacaattcattcctaaagatgtgcggccaggaacagagagatggctcaggggttaacagtacttggtattccattaggacccaagtgctgatcccaatacctacatcagctggctcggctcacaaaccccctgtgcttgcagatgcacaggatcttctggtctttacacacactcgtcctcaccgccccccccccttttttttcctccacagacacaatttaaaaaaaaaaatcttgggttggagagagcactagcagttaaaagtatttgttgctcttgcagaagacccggattcagctcccatcactcatggtgactcacagcccaccataactccagttccgcagaatctaatgcctttgtctgatctccactgggcatcacgcatgcaggtggtgcacatgcgtgcatagaaagctcctgaatggtgctggctttgatggttcatggctttaaccccagcattctggagccagaggcagatcgacctctatgagttccaagccagtctggtctaaatgtgagttccaggcaagaccctgtctaaaaaaaaaaaaaaaaaaaaataattgagggtcattctctggtgcatagcaaatcaaggtcagccttggctaccaagtctcaaacaaaaggaagcatcatgcgctgaggagaatcacctagctgggtatttaggaagatccctttaggaaaaaacaaacaaaaaacaaaaacaaaacaaaaacggcgctggagatggctcagtggttaagagcgctgactgctcttccaaaagtcctgagttcaaatcccagcaaccacatggtggctcacaaccatctatacatctatagtgtactcatatacataaaataaataaataaatctttttaaaaacaaaaaacaaaacaaaacaacaagaagaaaagaagaaaatggcaggagccttacagtgccagactgcaatggggtagacaaggtgaattcatggctctctttccttttttttttttttttttggtttttctgtatagccctgggtgtcctggaactcactttgtagaccaggctggcctcgaactcagaaatccgcctgcctctgcctcccaagtgctgggaataaaggcatgcgccaccaccaccatgtctttcttttctcttctcttctcttctcttctcttctcttctcttctcttctcttctcttctcttctcttcttttcatttctttcattcattctttttagcagagtatccctggctgcctggatctctttatttagaccaggctggcctctaaatcacatagatctgactgcctctgtctgctcagtgctgggattagaggtatgtaccactacacccaagataggctcagatttttaatatacaaaaattgacatagcccccattgattgataaacaatgcagaaataatgtgaatatgtatatacacacttaatgtacacacagatatttctcagttcttctcagagggtttgggagcagtggcaacccaaggacagtgagaaagggactgatattgagatcattgcttttatttctttcaattcatttatttttaggtgtaagagtgttttgcctctatgtatgcctgtgctctatgtgtgtgcagtaccatcagtggccagaagagggcatgaaatcaccttgaaatcacaaatgggtccttttggacgagcagccagaactcttaaccactgaaccatctctctagcctcagtttactttttaaaaaaaaactatttccagggatggagagatgcaaagtggttaagagcacttgctgctctgccgagggcctgggttcggttcccagcacacacacacatgttggctcacaactatctctaactgcaattccagaagataggaactctcttctggatctcttgggttcctgcatgcatttggtgcccagaaatttgtgtagacacacacatacacataaatataataaatactatttccactcaaagataccagagctccttggggagaaatggatggttctagaggaagcctataaaggaacctggactgtttatgtcaaacattaaaaaaaaattttcaaagaattatggatatatacccaaaggactctcactgaaagtgacctttttaaagacttattttatgtgtctgagtgtttgcctacatgcatgtatgtgtattacacaggtccctgatgtttgtgaaggctagaaaagggtgtcagatctcctaaaactggagttaaagatggttgggaactgccatgtgggtgctaggaaccaaacctagatcctctggaagaggatcaaatgctcttaattactgagccacctttccagtactttctcgtgacttctaacagccaagttagagacaattagatcatcaaaataatgnnnnnnnnnnnnnnnnnnnnnnnnnnnnnnnnnnnnnnnnnnnnnnnnnnnnnnnnnnnnnnnnnnnnnnnnnnnnnnnnnnnnnnnnnnnnnnnnnnnnnnnnnnnnnnnnnnnnnnnnnnnnnnnnnnnnnnnnnnnnnnnnnnnnnnnnnnnnnnnnnnnnnnnnnnnnnnnnnnnnnnncacacacacatacacacacacacacacacacacacacacacacacacacacacacacacacacacacatggtgaccatacattatataaccattccctctggattgacacattcctactacacatgaaactcacaggaaactaacaagaccaggaagctcactggcccttcccatcagttatggatcagtaaacagttgttgaagggaggggactccttgacggaagagcaactccagcaacccatgctggggtgggaggacttcttggtgatgcagccacttctgaatcacgcatgctcattaagtaacactgggaaattcgtcagtttccccaacctggacaccatctttcctttgttccgttatcagtgctgcaactgccgcaaatggacactttttctgtgccccctgggaatgatatgacaacaccacatag

SEQ ID NO: 3476 - DNA, 2033 bp, Mus musculus
gcctcccccgcccgcgtcgtacagctgggccagtgacgctggcgcagccgtcgccaccgccgccgcgttccatcctcaggagccggccaccgctcgcgtcctcgtcctcgtcctcctccttcgtcagcgcccggccgcgtgagccagaccagggcacgcgaggcgtcgcgggggacccgacagggagtgcaggcaggcgggcgcgctcagcggcggagcgggttcggcgacgcgggagctgctagcgccccctttcccggaggtctcggcgccgctcccgggtgaagctactcctggctggctttaggattcttctggattttaaagtcgttctttttaaaaataaataaataaataaaaacctccgacggataaaagatgtgccatggcaagatagcaccaaagagcagctcagagtttgttgtgacttctgtggggcatggagtgtttcttcaactggtgatcctttgcgctctgctgggagatggattagcctctgtgtgtcctctgcccccagagccagagaatggtggctacatttgccacccccggccttgtaaagaccccttgacagcaggcagtgtcatcgagtacctgtgtgcagaaggctacatgttgaagggtgactacaaatacctgacctgcaaaaatggcgagtggacgccagccatggaggttagctgtcatctcaacaaagaaacccatgcacttggggtccctgcgctgtccatagtggcttccactgccagctctgtggcactcattctcctcctcgtggtgctgtttgtactgctgcagccaaagctgaagtctttccatcatagcaggcgtgaacagggggtttctggggatcaagtctccattatggtggatggtgtccaggttgcactaccttcatatgaggaagctgtgtatggaagttctggtcactgcatgccaccagctgatcccagagtacagattgttctgtcggaagggtctgcacctagtgggaggaacatgccaagggaacagcagctgcaaggccaggaggcctgctcttctgcaggtggagaggacgaggccccgggccattctgggctgtgtgaagcctggggttcccagggctcagagactgtgatggtgcatcaggcaaccacatcttcctgggtggccggctcagggagcagccggccgacacacaaagacactgcagattcagaaaacagtgacatacaaagccttttatccctcacatcagaggagtacacagatgatatcccactattgaaagaagcatgagggctgccgctggcctctgtcctctctgcccgtcctctctcttcctgtgggtttgagtaccatgtcctctctagctgccccacctggatgcctgaactgccacctgtgtatctctgtgtacctgagagcctgcaggccacctcgatggatactcaagaaagattctcaccatctgcccactggacagctggaggacctggccctttgcctggcccagccttcccatctgtctgtcagggatgtgtctgaatgcgctggattgaacctccccttcccctcagcctctgggtcccttccagccagctcttggtggcagccccgcagccatgagggcctgagcactgctgtgtttacttgtgccttccccaccctgtccaggttccctgttgtgcaggtgggttgctatccacaggccttagtggctactgccacctgtacccgggggccaggcctgaggctgcagaaacagattgaagagtagtaaggcactcaaagcaggaatagctcatgctgggtccagaatgtgggtccctgagcttgccctgtgtgttgacactgatggcggcatcttccttaactgaggacagaggtttgggaagtcatgccaaagccacccagcactcgctgaccagctctcgtgcaggttcctggctcttttgagagtttctaagaagcacccagaagacctgtgggaaggaggaaaggtgtcagataatgattgtcttcctaatactcaagttctcacttcctgc

SEQ ID NO: 3477 - protein, 296 aa, Mus musculus
MCHGKIAPKSSSEFVVTSVGHGVFLQLVILCALLGDGLASVCPLPPEPENGGYICHPRPCKDPLTAGSVIEYLCAEGYMLKGDYKYLTCKNGEWTPAMEVSCHLNKETHALGVPALSIVASTASSVILLLVVLFVLLQPKLKSFHHSRREQGVSGDQVSIMVDGVQVPSYEEAVYGSSGHCMPPADPRVQIVLSEGSAPSGRNMPREQQLQGQEACSSAGGEDEAPGHSGLCEAWGSQGSETVMVHQATTSSWVAGSGSSRPTHKDTADSENSDIQSLLSLTSEEYTDDIPLLKEA

SEQ ID NO: 3478 - DNA, 5188 bp, Mus musculus
gtatacttccttgcaaatgacagtaattaaaacatccaaataataaccaaacaataacagtaaaagaaccggagggccctctaggaaggtggcttaactagagtattacagccagagcagttcgagtgactgtctctttaaggttccctccccccgccgccaggggcgtgtcagacaaggtcagaggcgcgtgcgcgtgactcctcggggcggtcgcagcggcgcgacgcctgcgcttgttgcgtgcgtgcctgaccccgcccaggcctcgtccctgccctgccccctctgcggggcctcccccgcccgcgtcgtacagctgggccagtgacgctggcgcagccgtcgccaccgccgccgcgttccatcctcaggagccggccaccgctcgcgtcctcgtcctcgtcctcctccttcgtcagcgcccggccgcgtgaagctactcctggctggctttaggattcttctggattttaaagtcgttctttttaaaaataaataaataaataaaaacctccgacggataaaagatgtgccatggcaagatagcaccaaagagcagctcagagtttgttgtgacttctgtggggcatggagtgtttcttcaactggtgatcctttgcgctctgctgggagatggattagcctctggtaaatggatggaactagaaaatatcctgagtgaggtaacccagacccaaaaggacatgcatgtgtgtcctctgcccccagagccagagaatggtggctacatttgccacccccggccttgtaaagaccccttgacagcaggcagtgtcatcgagtacctgtgtgcagaaggctacatgttgaagggtgactacaaatacctgacctgcaaaaatggcgagtggacgccagccatggaggttagctgtcatctcattgaagacaaagaaacccatgcacttggggtccctgcgctgtccatagtggcttccactgccagctctgtggcactcattctcctcctcgtggtgctgtttgtactgctgcagccaaagctgaagtctttccatcatagcaggcgtgaacagggggtttctggggatcaagtctccattatggtggatggtgtccaggttgcactaccttcatatgaggaagctgtgtatggaagttctggtcactgcatgccaccagctgatcccagagtacagattgttctgtcggaagggtctgcacctagtgggaggaacatgccaagggaacagcagctgcaaggccaggaggcctgctcttctgcaggtggagaggacgaggccccgggccattctgggctgtgtgaagcctggggttcccagggctcagagactgtgatggtgcatcaggcaaccacatcttcctgggtggccggctcagggagcagccggccgacacacaaagacactgcagattcagaaaacagtgacatacaaagccttttatccctcacatcagaggagtacacagatgatatcccactattgaaagaagcatgagggctgccgctggcctctgtcctctctgcccgtcctctctcttcctgtgggtttgagtaccatgtcctctctagctgccccacctggatgcctgaactgccacctgtgtatctctgtgtacctgagagcctgcaggccacctcgatggatactcaagaaagattctcaccatctgcccactggacagctggaggacctggccctttgcctggcccagccttcccatctgtctgtcagggatgtgtctgaatgcgctggattgaacctccccttcccctcagcctctgggtcccttccagccagctcttggtggcagccccgcagccatgagggcctgagcactgctgtgtttacttgtgccttccccaccctgtccaggttccctgttgtgcaggtgggttgctatccacaggccttagtggctactgccacctgtacccgggggccaggcctgaggctgcagaaacagattgaagagtagtaaggcactcaaagcaggaatagctcatgctgggtccagaatgtgggtccctgagcttgccctgtgtgttgacactgatggcggcatcttccttaactgaggacagaggtttgggaagtcatgccaaagccacccagcactcgctgaccagctctcgtgcaggttcctggctcttttgagagtttctaagaagcacccagaagacctgtgggaaggaggaaaggtgtcagataatgattgtcttcctaatactcaagttctcacttcctgcttccagcactggctgccttggccttggtttctgttcctggataaggggaagttgcatgctgtttcctggactttgtcctaggtagctctggcttccttgcagcccacagaatcctgagatttgctgagatgccaacaaaagctcatctggcttttggcagtctgggcaagttgcccctttttaggtttgtggtgatggaggggaggctgataggtacagaccaagtccccggtggctgcaggcagctccggcaggtcctgaggatcctcctcaccacggtcatgtgccttagtaactgtgcccaggaagtggcctgctgtgccactgctcccactctgttctctcctccctgcctttccacacgtcatcgttgaaaagccactccttattttccctgccagctgatagagatggtgggcacccagaaacctgagatacaggtcctgggagtgggaacgtactagcctagaagaaatgctccagccatttccagcctcctattgccctgtactgaatgctgacaagtctgggtaactgagccccaccaggcttctaccatcttgagaagacagatgtggtatcaaggaatgtgtgtgttttttttttttcttctcatctttcttcctttcttccttttcttcctcttcttcttcttcttctttctcctcctcaagccttggggctgggaaactcttcagagccagtcctggactgaacctgtgatgagcctctctggggtggtaaaaataataaaagcccagtatatttatagttcctgacacaacagggttagctccaggcatctgtggcctcaaaaataggggaataacttctcctagccaactgcctccattcacaatgcactttagtccctgtcatgcctggcttcctgacaccctcatctcctctcagggtaagggcagtgtctgctgtccctgctggccactcccacactaacccaggaggccagtccagtgtgcccagtgtccagacaagtatggttggctgaggaatgagctggaaaaggtgcttagactagacgactagaacacccctagcaggtgctgccataggcttacctgggggtgggttccaaggccccaagccacctcaccatggcgcttcttcagcttcagtggtgtccacccccctcaagggagaactgggcaaggaacacgagtcttctgaatgggcctgcctcttttgcttactgctcttctaaaatctgagttctgttttagttctgtgtcgttaccctgggcttttgccccttacagattgcacttctttggcttattatttagccttgtaggtgcctggctttggccttgggaaaaagaacctcctggtgcctcgttttctctcagcattcattagcctgctgtggggaaatcacaggcccaggcttgcctaactgaaggataaagggcacccgtgttccccatcctcttgtcacaggcttttagaaggtctgttcttgaggtctcacacctgttgctggcatctgtggcttcttcctgcattgttttcttctacagcaatttcttaaccattagccatgtgctgtggtttctggggcatctgggctttgtccattacagacggactggggacttaattgccttgaagtggagcctgctagaaacagggtcagtggcaggtggcaggcggatgggcaggaagaagcttcgagcaagtgggaagaaactaagcagcctactttactgggctcacctccagggacatcctgagacttgtccaaaagaggcagtcagcaccaaaggacttttacacagggttttttggtttgggagatgtttttgctttttcatacttacactgactcaatgcaggttttatatcctggtgacttgctgtcacattctatcagttttcaagggccagaatgatgaaataaataaatagaaaattccgtccttccatgccttagtttaacaggtgagctctacctgcccagttctgtgttttgtgtgagaactgtgaaatgggcggagtcctgaccactttgtgggttcgtttggttttataaggcatttcaatgtacattcttcaagcactccatttgcaaagagaacttaaagtcatactgtcttccccattcatcctgccctccttgcacccccagctttacagttctgtaaagaagccaggctacaagacagacaaaggtatatttttcctgctttgagagtggccaagttgggatagatggcagttggcctttttcctcccagtcctatcagagctcttgagtcacttggcttcctgcataacaatatctcctctgttctgaggaacattctagcatagaaaatggaatatgctgcaaacatttctagatccttcctcccttccccctccttaaagaacaaagaagggacacacagcatgcctaccacacagcttcattccaggtatgcttgcgcctgacagtacagctagagccttctctgtggggcctgctgggtctcctgcagccttagagaatattttacttggcattttactaggcagttgaaaacctagtagagtttgaacaaagcgcaccccaccccacccgtccttcacccagcagcagagctcaccatgagggtgcagagtagagcacttggattgccaagtagggagaggaagtagttgagggttgcatggctgtatccacactggcctggcttcttaaggctgtgcaccactatgggatcctttgcagaatggtactcataaaatggtttaaacaacacatgcttaattgactgtgcaggatgtcaatcaatctgggtttgctttattttattttatatatatattttttggtatcctgtacattgcagtgggtatgaagatagtattttaatatttgtacaaagtttaatttaattttaattgttctatgtatataactgcatttctaaa

SEQ ID NO: 3479 - protein, 319 aa, Mus musculus
MCHGKIAPKSSSEFVVTSVGHGVFLQLVILCALLGDGLASGKWMELENILSEVTQTQKDMHVCPLPPEPENGGYICHPRPCKDPLTAGSVIEYLCAEGYMLKGDYKYLTCKNGEWTPAMEVSCHLIEDKETHALGVPALSIVASTASSVILLLVVLFVLLQPKLKSFHHSRREQGVSGDQVSIMVDGVQVPSYEEAVYGSSGHCMPPADPRVQIVLSEGSAPSGRNMPREQQLQGQEACSSAGGEDEAPGHSGLCEAWGSQGSETVMVHQATTSSWVAGSGSSRPTHKDTADSENSDIQSLLSLTSEEYTDDIPLLKEA

SEQ ID NO: 3480 - DNA, 123545 bp, Homo sapiens
ttgtggacacgtttatctccctactcagaaacttgagggcaggagctggacaaagcaatcctcagcacagactgctttgtgagcgaatgaatgaatgaatcaatgaatagcactgctacttggtgtaagtactgttcatccagtaggtttaaagccatggttctttatgggcagtgtcaaccctagaggctgtttggacatctgtgggagtgtttttggttgttatgacgatgaaggcaccattggcatttagtgggtagggcccaggatgatacaaataatatcaagcacttattttgtgctcgtgtgtgccaactgctgttttgagcacttcattgaagtgaattcatttcattttcacaacagccttatgaagcaggtactgctgtcactcccatttcacagacaagggggcatagtcagtctgcaatagatagccctacacagcatagaaccatcctgtgtgcctatacaaagtcatagactcttgtatgccttccactagatgtttctatagggaaaacaaataaataaacaaacaaaaaaccctgttataatgatcagaatacaactacaggggctgggcgtggtggctcacacctgtaatcccagcactttgggaggctgaggcgagcagatcacttgaggtcaggagtttgagaccagcctggctaacatggcaaaaccctgtctctactaaaaatacaaaaattagccggttgtggtggcaggtacctgtaatcccagctacttgggaagctgaggcaggagaattgcttgaacttaggaggcaggggttgcagtgagccgagatggcaccactgcactccagcctgggcaacagagtgaggctccgtctcagaaaaaaaaaaaaaaaaaagaaagaaaaagaatacaactacaggaaaaatgtgctttatttttcagcattttaccaagagctgaacatatcagaacataatagcgacattgttgaaggcatttgcatcactaaaatcacacacctacatctgtctgcatttgtaattgctatgaattgactctaggtgcaagcggccttttcttttttatattacagttagggcattgtattgattgattgtttttttttaagtaaactttttattgaataactacatacttcaaaaaagtggacaaatcttatgagtacacctctatgaatttttgcaaaatgaacacaccttcataaccagaacactctcaataccctggaagtccaactcatggtgccacccagtcacaactcctctaggtaactactctccttacttctaacaccttaaattaattttgcctacctttgaacttgatataatggaaacatacatgcatgcttttttcgtgtctgacttctttcagccaaaatcgtatttgtgagattcatccatgttgttgtgtgaattggaagtttgttcattttctttttttttttgagacagagtctcactgtctcccaggctggagtgcagtggcgcgatctcgtctccctgccacctccgcctcccaggttcaagcgattctcctgccacagcctcccgagtagctgggactacaggcatccgccaccatgccccgctaatttttgaattttcagtagagacggggtctcactatgttgaccaggctggtctcaaactcctaacctcaagtgatctgcccgccttggcctcccagaatgctgggattacaggcatgagccactgtgcccaccgtgcctggcagaagtttgttcgttttcatcatgtggacataccatatccatttgtgttgtttctagtgtctggccattatgaataatgatgctgtgaacattcttgtacgtgtcttttggtgaacctatgcatgcatttattttttgcaattatgtgtgtaggcagattatgctatgattttcatttcatggtagtggaatgggggatgtcataaaatactatccaaagggggcataggttctaaggggatggttgagaccctcctgttggaagcagatgcttctgtccatcgtccatttgtcccacaaggattgtcccagctgtcctgtgctctgtgctgggaaatgccatgatggtactctgtggagggagactctggttgagcgtcttgacctaaggttggagggcagaggctgcattcttaatcccaccactagaggccgggcattcacaagggactgaggaccagcagcccccttcttccaggcaggcttcctctcaggttcctgtccctccatctcccttggtaactggagaacatactctattgggggatatggaaagtaagaaatctttatggtgcatctaggtggagtgcatctcaaatagaaccgacacactttttttttttttcagacagagtttcgctcttcgcccaggctggagtgcaatggcatgatctcggctcactgcaaactccgcctcccaggttcaacccattctcctgcctcagcctcccaagtagctggaattacaggcatgtgctaccatgcccggccaattttgtatttttagcagagatggggtttctccatattggtcaggctggtcttgaactcccgacctcaggtgatccgcccgccttggcctcccaaagtgctgggattacaggcatgagccactgcacccagctggaaccgacacacttttgaggcatcaaacatttctcacctggcctcagaactcaccttccctgtaaaatggagactatggggtctggctgcctcctagagatactccacatgtgccctgcacccactaaccctgctggctctgctggtgagctcagctagccctgggttcacctcctccactactgctacagaccctggtgctggaagctttcagttttccagatgtaaatgtttcacatttcaattgtaaatgtttagcaacttgttctataggtgggagctgatttatatttagtaatttctgtggtgtaaatacttccactgtatctgatttcaaactatcaatgtgatgtcactgaatgtggagttgagaagagatgagaagtggcataatatgatgtagtacttcataagagatgtaaataaacttgaaagcatagataagagtataatgtaagagaagggaggcagaaaaagtaaaaaaatacaatgtagtaaaataattaataattaggaagtggtaacttgagtatttattactttaacaactataatttaattttacatatatataatttaattttttaatttttaatttttttggttttttttgagacagagtcttgctctgtcacctaagctggagtgtagtggcacaatcacagcttactttagtcctgacctcccgagctcaaataatcctcccacctcagcctcctgagtagctgggaccacaggcgtgtgccaccatgcctggctaatttttgtattttttgtaaagaggtctcactctgttgcccaggctggtctcaaacttctgagctcaagtgatcctcctgctttggcctcccaaagtgctgggattacaggcgtgagccactgctactggccataatttaatttttaacaaaggctgtgtttaacaactagcttacaaaaatcttgaacattttagaattgattcttgacagtttgagcactcttcagcacaccactgcaggtaacctgctctggtccccctttaaaaatcacatttggtttttacagtgcaaattacagctgtattccctaagaagcaggacatgctactagtaactgtggccttggcctcatctttaaactttatgtacctcagtttcctcatatgcaaaatgaagataatagtattaatacctatttcagaggctattgcaaggattaaataaaatcatgtatgtggagccactagcaaagtatctggcagacagtacatatttaatgtattggagcttttttcagggggttcattgacatgcctgggggcaaagctgcaccttggggtccatcatcagcaccttcaaaataccctgattttggaggtatcaaaataccctgattttgaaggtccctggccagccaaaagagggactgaccctactgatccagccaacaagtcctggagccaagaaccttctgaggtgttgtgtctgccagagcttcacagccctatccctgcctccccagacagtctgaaggagggagcaactccattcctctatgcactggcagctcagagctagcaaggccaatcatatagctctgtcttctcaccattaaatcacatgaaaatgaaccatcagggagggaatacagtgtccaatgaccaggagctgtgtgtgtgtgtaggtgtgtgtgtgtgtatatgtgtgtgtgtgtgtgtgtgtgtgtatgtgggaggggtttgtgggctggctctgtctagaaaggcctcaggccctaggctatccccagtcccttccttcctccctgcagattgtctcctagagtcactgcccagcccttgggcaaagggcaagcagcaggtcatcaggctggttggcaccaggggtgggggggatctgatattcattcatcttccactgggataccatctggagacatagcaggtggatgctccctttctaccttggcttttccttgtgtgaaaaatggggccaacacttttaccagttaacctgacctgtattagggaaagaatgttgtcaaagacatgcttcagaaaagcaggtggggctgggttgccctcttatatgtatctgctaattgggcagcctcaagtgcacattttctaaggctagggtcagagttggggtggatagggaatcatagctgctgctgtgaatagcccagatctaagccctgaactctgacctctacaaagctccctccgaccagtggcctgcagggattgcgtcaccaagcctggctctcacaggctcctgacaagctgcaagaagggttgcccctggtgatggtgcaggctcacaaattcagataacctcctgagcctagatcttcctcctctggagtgggagttgcttctcagctcctgttggcctagccctgtacagcccacccattttggactctgacattctgcggtgagggtggcctcaccttccacctcctctggggtcaaatgggtttaccttcacagggctttgaaagctgcccaaggaatcttgaatcaaaacatgaaactcatgctaatttctatatgagatcagacaagctagcaacctttcggtgcctcaacttccttataggtaaaattggggacaataatgtctcttcgttttatggggatgttgtaaaaaactagctggtatgcaaaaaagcacttttttaaaaagcaagagatatatgaggacaatttcaatctttatttgctatttttattaggggtgggaggaagcacatggtttatttgggaaagtgtgacctttggaacagacaaacaagaatgaattctgcttttgcaacatacatacttatgtggttttgatatgtcaaaaaaaaaaatctctctaagccttgcttgtaaaatggtgttaatgataattaacttggaggactgttgccaaaattagaggttacacgtatcaagtccctaccaagcacctgacatacagtaggtgctttgtaaatagtagctgtcattactactattgtatgtaataaccatagcaactgagattccatgtacttattctgaaccttttctctcactttcagagagccaaactcctctgtcctgccctgcaagcagtaaaggcacacactccttgttatattcctgggagatgaaaggaatactgtgcctcctgactcttatcataggagtgactacctcatcctgattggcccaggactgtcctaattttggcactggaagtcccatgtgccaggaatccccttagtcccaggcaaactgggatggctggctattctactcaccaccaactgggactaatctaacccccatgccatattccagcacctagatttagagcagaatattaagatttgtgctggaaattggccaggtgtggtgactcacgcctgtaatcctagcactttgggaggcagaagcaggctgatcactgaggtcaggagtttgagaccagcctggctaacgtggtgaaaccctgtctctactaaaaatacaaaaattagctgggtgtgggggtacgcacctatagtcccagctactcgggagactgagacaggagaatcccctgaacctgggaggcggaggttgcagtgagctcagatcatgccactgcactccagcctgggcgacagagcaagactccgtcaaaaaaaaaaaaaaaaaaaaagatttatgctggaaatctggaaggacccaggaatattagctcaaagagccatcttaagtccttttagaataaggcagggtctgaattgaaaagtgaaaataaaaaattagctctggtttaaaattgattgttaggtggaagaaacaaaaaatcaattataaaggccacatatttgtatgattctatttatagagagtgctcagaataggcaaatctatagagacagaaagtagattgttggttgcctagggagggaggcagggaaggtggtagggagggaggaaatggtagtgactgctgatgggtatgggagttttttttagggtcatgaaaatgttctaaaatattgtacgactctgtaaatatactaaaaaccattgaattgttcactctaaatgtacaattgtacatgtgcaaatttgtacaatttgtaaagttatacaaaataaatacaaatttaaactgtgaattgctggtatgtgaatatctcaataaagctgttaattaattaattaatttatttaagacacagtctcactctgtcgcccaggctggagtgcagtggcgcaatctcagctcattgcagcctctgcctcccaggttcaagcaattcttgtgactagcctcccacatagctgggattacaggcgtgcaccaccacgccaggctaatttttatatttttagtagagacgaggttttgccatgttggccaggctggtcttgaacttctggcctcaaatgatcagcctgcctcagcttcccaaaatgctggggttacaggtgtgagaaagctgttaaattaaaaaaaaatcttaaaaattttaaagaattttatttaaaaaaatctatgatccctcccacttgagaatgtctaagtctaaattattcttaaccttcatcttgtgagatcttttcaatggcagaaagataatattcaccccaggccaggaagtaccattccattttgcgggtgagaagagcaaggcctatacgtagaatgtaacaggggcttttcgtcagctgtactgaagaggccagtggaacttcagataggaggggatgagaagacaggaaaggctggtgagctgacatttataaagggaggagacttgaccctgattctggcaattcaaagcagaaggaaatggaagctaatcccagctgtaacccagctactcgggagactgaggcaggagaatcccctgaacccgggaggcggaggttgcagtgagctcagatcatgccactgcactccagcctgggcgacagagcaagactccatcaaaataaataaataaataattaaatatttaaaatgtttaaaaattttaatttaatacttttctgtggcactttggggctcaaccaaagtgccacagaaaagtagaagcagcagccttgggaagattctgaagggtaagtagagaaggccttcaagattgaggaaacagcatgggcacctggtttgtgacaggaatggcttgttagagaccagcaggtggtatggggaggctggagtggggtgtgtggagggatggagagcatttgggccggactgtggacagcacaggatactacagtccttgctgatgagtttgagttcattctgtggaccctgaaggcctgggagaggattttttttttttgagacagtctcactctgtcacccaggctggaatgcaatggcacgatctcggctcactgcaacctctgcttcctgagttcaagcaattctcctgcctcaggctcctgaatagctaggattacaggcctgtgccaccacgcctggctaatttttgtatttttagtagagaaggggtttcgccatgttgtccaggctggtctcaaactcctgacttcgtgatctgcctgccttagcctcccaaagtgctgggattacaggcgtgagctaccgcgcccgactgaggatttttgggtagtgatggacagatctgcatagggtctcacaagggattttataaggtggcagttcttgtatgaagttactgagcctcttaatggccaaactgacttcagtgcacagccaggggctcagttactttggcagttgatctgacctgaaccatccatgcctgctttcttccctttcctttctttctttttctccttcctccattcatcttctccaattcttcctccatccctttcccttgcttccttcccccttgtcccctccctgagccttgggtctgcctggcatgttcctgctgcccacactgatttggttgtgctctgaggcagacccaggtagttctgaattgtgcttttcaatcttctagtggtctgggcagtgtggccccaaatgagcaggaagggaggggtgcccatcttctctaatgagtctggacccaagaaggcaaggaagaaagaaggcagaacaaggatagacttatgaaaaaggcattatagcaacgagccacaggttgctgtggggcccagaagggaagggttcttttggggatgggtctgtgtgcatggggaggagcatcctgtttatttggttcaagctacttcacaaggacatgccctgttaattcacagtgcttttcccgaaagcctactagaactaggcctggtgagaggccctgagaaggtgtatccttttgtccaagagcatctgggagaagaggcctgcctgacccaagctgcagcaaagacacaagtctgtaggtccagatgtggactctaccactgatttacaagtaggagttccttaacacttatggaggacctctgagaccgacacggtgcaaggccctggggtacaaagataaaaagccagagtcctccccatcaaggcgccacgggccctgtaaacacataaaccgaggacacactgcatgagagatcaccaataaacgatgtagccatacagtgcacaaactgctcactcagtatgtgctagaaaatagccccagaaggcaaggctcaagaggggaaatacagttaggaatgtggcaggcttctagcccgggctctgccagtcctggctctgaactgcggttttctcaaccttgagatcccttgtgtgcttttagtatgctgaaggatcactcacttcagaatgctagtgaaaatacagattcccaagtccgaccccactgaatcacaatggctggaggtcattcggggccccgaatctgcattttcacccccacccaccccccgggcagctttaatgttggcaggctaggaaccacagttcggattactgcttaacagggagataataacctgcttcagacgagctaggtcagacgagcaattcaagagctaacaaggcaacatgcgccaaaagccttgtaaacctcagggcagtacaattctttgcaaataatagtaattcaatcatgcaaataataataatagtaaacgaactggagagcgcactggaaacgccgcatagtccagctgagtcggtgccaccgccccatccactccagcgcagagggactgtctctttaaggaccccccacctccccaaccgcgtcgcttctcccttgggtacctggcccggccggcggcgcgtgcgtgcagggcctcccggcggggcggtcgcggcggcgcgacgccggcgccgttgcgtgcgcgcctggccctgcccctttcccgccccttccccgccccctcccctccgcggggcctcccccgcccgcgcggtacagctgggtcagtgacgcgggcgctgcagccgtcgctaccgccgcgttctattctccgaagccggcgaccgccccacctcctccctccctcccgcccgcttcctctgcccacagcgccggccagagcgagctagacaagggcacgcggggcctcgcctagacccgagaagactgcgggcgcgcgcaagcggcggcgtggaagctgtgagcgcccccatcccggaggtctccgccggctcccgggtgagttgtcaccgcggcccgggggcggcggggccggcattgtgccatcgacgcgctcggccggctgtcaggggcgcgggaccagcgcgcaccgcccaggagtgacgctggccggagcccgggccggcttcggcggctccccgcgcttctctgcgccggcccgctgtcacccggccgcgagccgcgccgctgggagccccgcgctggcgtggcgcggccagccggccagcagtgggggctgcgcggccggggggaccggcggctggtttgcggccgggaacttggtgacccgcggtccggggcgcgccgtcccgcgtcgctgcccgggcagcaccggaagagccagacgccgtgccgatgggtgcagaggaggtaggcagaggccctctgtgccactgtcattactgccctcagcccagcaaagctgcggggcttgcgctggggcagggctggcttagagaaggtggatttcctgaggaaatctcagagcccgcctgtgcgcaccgcggcattcgggagcccccgcgcctcggctgctctttaatctcaaaaacttctcttattaaccaggctaaactccccgaaaccagctattttctttcaaaaagtaggcacgtacatacagactttccttttttcgcttggttttgagaccccagctatgagtgtggatctgactctccctcatgggagtcgtggctggggagctgctgaagtggagaaaagttaccctggacgaatttaggagcaggagggggaggtggttatggggacagcaagacccaggagcaaagaggcgtcaaaataaagtcttgggctggttaaagggaagttggcgtctgggcaaggaggcctaaagctgttgttcccacagaattttctttcagtggcaggcgacatgctgggctttgttgctctcgctaactgggctcctgtgtgctcttccagaggtgcagtaagattactcagttcaattaggcctagggatttactcccttttttgatctacagagatgggaagtatgtctttccttcacagtagttaattcatttcttgctgttttcgttcctctggtgtaaaaacatacataggagttacgcacacacaccttttctgttttgggaattccacacccaaactgtcaccatctagtggaggctagtagagacatgtgcttggcactgacttctgagttctctgggttttgtgtttttagctagaagcatattcaaccagaaattaaaattttcctggagttgggggaggtatgtctacatctcaggaaagaaggtatttaagcagcaataatatggaaaggttcttgaggacttactgagtaccaacctttgtgctaagggctttacttttttgaactcatttaataacagacttttgatgtagatattattatccccattcttctagttgagacccaaaccaaacaagttaaataactcgcccatgtcacataggtatctcatggtggagcccacagtctgaactactagattatactgctagtttctggtttgtttaccttttgataaaattgaacctggagtctttctaaaaccttctgaaagcactgctgcttcaggctgtttctcagatcatgagcattctaaactctttctcctgggtacacacttacggtatgtttgcataagattcatttgttcattctttcattcagtactcccaagtagttatgtgataccgaatgtatgccaggcactgtgctaggtattgcaggtactgcattgaataagtcagaatccagctctcatggactcacagcctttaagtccatttgttttggtttatgttgttagctttcattgctggccatttgctgctgaaggaacttctgcccagcgagttaaacagaggacagtattggtatgagtcctgatagataggacttcctgtctgcagagtaattttttggatactgtagtagaaatggcatatgaaacaaatcctcacttacacctagatagagacaggtgccagggtgctcagtgtttaaaccctgagagcaaacccactgtcaaatgggcaagtttgacttctttcgctgaagcctgccttctgaaagcccagaatttggtgagatagaagagaaagaagggtagaatgaggtgttacagatacaggctggcagataaagagacctcagcactttgtctgttttcctggtcagtctctgaggtgtggtgattgaacttgtgttcttttttattttttattttttttgagatggagtctcgctctgtcacccgggctggagtgcagtggcacgatctcggctcactgcaaccttcacctcccaggttcaaacgattctctgcctcagcctcctgagcagctgggactacaggtgcgtgtcatcacgcctggctaatttttgtatttttagtagagacttggttttaccatgttggctaggctggtctcgaacgcctgacctcaggtgatctgctcgtcttggcctcccaaagtgttgggattacgggcgtgagccaccgtgcccggcctgaacttgtgttcttatgtaatgttgcatctctcagtaggggatgtcctcctttgctcttttggtggggcagcaattcctgcagcagccttccctctacatgcacacacacaccccttccaaaaggtaataattcacctggtttctttaaagttagaacttctttcaagtttattgctactaagcattgtttcactccctccacacttgtccatttcccacataaaaacttggcttttgcttcaaatattttcttctgcccttttttcatatccttagctcttctgacaaccaagttactactggtatcatttgtaggctgggagaaatacagcatctttaaaaaaaaatagtgaggtacatactcttcctcatttcagtaccaaacaagtgaactgtggagaatgaagcagaaccacttgccagcagagagggaaggccagagggcacacgtggttgtctttcccctctagttccccatttattaagagacaattcacacttgcaggcccgaatgtcagcagatccattgggcccaggttgtgtaattgccatacatgaagtgagttattaagctcctgaaatgacatgctatctcctagttgaagctgacaagcaggatttattttccctcttctttctgtctggacactatggaagtcttgttagagggtgttcgctcaagcagtgggagaaagatcagaaggagccaatagaggagggagccccatgtcttgtcttcttttcaactttgagagcaaacattgctttgttgcagacttgaatgttgaggattaggacatttggttaaatgtaagctttgggacaaatgcaaaactaggggaaatagagactctttccccaggtttctcatgagctccatagtactcaggaacctttgggtggactgtccttgcgcgtcaagatctgttcactccacccctggcttggattcaaggcaacagccattgtgtgtcccttggatgagtgtaagtttgtgtttctgtgtaagaacctttcatcttaaaaagtacaagttctggggaaaggtgcctcttacaaggcttaggttttcgcagcagagcctgttaggcacctgtgttcttcttgggctgatgtgtctgcgatggtgtcctttttcttccctttttagttttttttggcctggaaaccagcagggtgcctccatttgctctctcatcctctggttcttacttgagtgtggaagtcgctccactggtggaccttgcagtggcactgagctgggtcacttcagccgtgaaaggccaactgtactactgtcaaggcttgggacagttaagcgtccgtgaaggtactggatacagcgacagcaggaagtgcagcagtgagaactgaaactaatttcacagactgtggtgttgcctgtgatgtagtctccctccctggctcttctatctcaaaaaaggaaaatagccacccttgaaacatctgaaggctgcgtgccaagaattcacacagtactcctgaaacaggatattactgaagcatttttctcaaacagaaacagatgtagttccctgttactgtcgccagtgttagtagatccttaaaattacctgacagcagtgtgcccctaaatgtactccccgctcctacacacatacacaagtgttttattttattttattttttggcaaagcctccttccttgatttgagggaagttagcctgggattcctgatgacagtaatagattctcagtgggtttgcagacggcagaggtggtgactgacaattctttattactcagaagaggatcttctctggtgaaaaatgattcaggattctgcagttggagattggatacaaaacctcagagaagggacacaaatagagatctttctcagcctcccctttcttgctaccctttgtagaggagagggaatgtctcatatttctaagtccaacctactgccagcagtgacttgccttcacccacagaaatttaagattagagtgtggaattgccctttatgtaaactgtccttgctgaaattttctttgactagactaggcttcagcttctgacaaagacagtaaaatgaaactggcttctgggaatggcataagagcctgtttatccaattcttcctttagattgttctcagttgagctcagcaaactaagtggacggaggcttgtaaaaggtaactgcaaaaagggtacaaggtgattttgcttaatttgcattttaaattatagcagtctatgcaaactgtttgaaggaagactgagagatgttttttggtggggaggcacaagattacagatagcttggaaaataaaagggaaaaaaaatcagcatgattctaccaccctaacataatgtgtattctgttttttccatcttcagatggtagtacctgtacattcagctttgtatttttttcacttagcttttttttttaacaggtcataaaattcacccatttaaagtacaattcagtggtttttagtatatttacagagttgtacatctatcaccataatctaattttgcaacattttcatcaccccaaaaagtcactccctatttctctacaatcccacctagccctaggcaaccactcatctttctctctatataggtttgcctatttggacatttcatatagatggaatcatatgatatgtggtctttaataactggcttctttcacttagcataatgtttttgaggcttattcatgttttaccatgtatcagtacttcattccattttattgctgaatgctattctgttgtattgatataccacattttgtttatccattcatcagctgatggacagttgggttgtttctgttttttggttatgaataatattgcagtattgctaagaacgtgtgtataagtttttctgtgggtatatgttttcatttctcaaggagatacctttaaagctgcatccatccatatctctactttgcggttaacattctcctaggttatgcagtttgtttgaggaagaacagtgttttagtaaactcttgatcctactgtggtgttgcggatattgccctgaatcaagaaaaggtgccaccaaaaaaaaatccaaaacccaaaaacaaaaagagagaatcctgtttttaagtttgaactctccagtagcattgtttccaaatatttggtgcagaactttaaccattggtgagagttgacagacgcgatagtgcctaaattcaatgcacatgtactgctgctttaaacaaataaagaggattttcaatgcgaagcctcagctctaaatctcatctttgtgttttatagagaggactttaccatgaacccccaaagccttccttatcaaatgtgatttatagttctcagaagcttttccttttcttgtgaaaaattccatgccagggttctgtgcacctgctcaaaggcttctgctaggttggggagtggaatgcttattgaacagagagccagccagcaaggtagggaggagggagagggtctgtgagtgccctgaaaatgtagatctgagaaagagtgctctttagagcagcccccacagggcttttccaggtggacctcaggtgtaacccgaggttaaaaacagatcatgccagacacaaaaaggagcagatggtgctgcttggagtgtcatttcctctacaggatgtgtccctgtgtggttttacatcatgccaaccatattaatgaaataatgcaacagaatgtctccttttgcccttgttccaattggaaccacaggttgagtttccctaacctgaaatatgaagtgctccaaaatcttaaactttttgagcacccacatgatggagaattccacacctgacctcatgttttaggtcacagtcaaaactaccttcagtctatgtgtattacgtgtaaatgaaacataaatggattttatgtttagaccagggtcccatccctgagatacctgattatgtatatacaaatattcgaaaatctaaaacatttgtgatcccaagcatttctgataaaggacactcagcctgtactagcacttgtgaccaacagctagtcttgctttcaacagctagtcttgctttccctgatcgtagatccctactaaaagctcttgaaagtgtgcatatgcaggctacctaatgatttaacggaggatcaagatggttacactgcagagaaacaggagggatagggcatatgccctttgtccagcaagacagacaaaaactaggaacttgaattctcttctctggattcctgtatctggagccaaggccaaggatcagttcttctagaaagttccctcctgtgtgtgtgtgtgtaaatgtgtgtgaatgcagccataacttccctgccaaaattcattgccaaaaattttgtgatttgaagcaggccttacctgttaatgcaaatttgattctcaaatcctaagagtttccaaaggttgagtgaagtgagatgagactcttagttgaagatccagatgcttcactgttgctatctagatgctaccaaaactcccagcacaacaaagtatatgaagagaggctctaggttcatgaaatgttagagttggaaaaatgggcctttggggttcttcttattctacctcctcattttaaagaaatgcaagtgggaaatggatgctcagagctgacttgcctgagaggtgaaagggctagtggagaagccagagcccctgattcctagtctagtgcttttccctcccggtgtgatcacctctttgtttctccccctcttctgggcctggtcccggaatgggggttgggagtccagcagggtgtcgtggttcatatttttgggaacaaattcaagttacttctgtgattgtagttttgagtctaatagtgaaattacaaaggcagtgagtcattaagtccaattcttctgaaagaaaactgttcttaaaatgggtgcagagccctcagggctgctctgcctatggagcagccattctttattcctttactttcttaataaacttgctttcactttaaaaaatcggtgtagttgtgtttaggctgtgcctgcttaacttttaaatctctgtgctgtgtatctttgccattcaaaaatgccacctggcctggtacggtggctcacacctgtaatcccagcactttgggaggctgaggtgggacaattgctcaagaccagttcaagactagcctgggcagcatagtgagagtccacatctctacagaaaaaaaaaaaaaaaattaaaaattagctgggcatggtgacacacacctgtagtcccagctacttgggaggctgaagttgggggatcgcttgagcttgggaagtcaagactgcaatgagctatgatggtgccactgtactccagcctgggtgacacagttgagaccctgtctcaaaacaaacaaacaaaaaaaaaccacctgaccccaggccaatgggatgtgtgctctgtctgggagaactgatcccacacctacaccccattaacctaccaaacccttcagagctgtgtctcgacttccttgggcttattgtatgtggaatcagctacccacctaaatgcagcgtgaacacacatctataactgtatgtctctaaccaggcacaaaggaagcaagtcatatatactggctttccccatcccagaaagccggtgaacagagtcttgtgtttagtgggtgctgctgtttcagttggcatgcttgagccattgctagaaaagtaaccaatgatatgttatctggtctacccctttatcaatcctccatctgcctccaggtagaaactctgccatgggaagaccgtctgcctccttgtttctgtcctgtgggaattttgcttgttacacagcagaatagcaagaaaaacaggctctgagtttcataagaattcatcgatccatctttcctttacatgtaccctcaagtcataataatttgtgagccgataatctggttaggctatgatgtcagactggtgggaggctggtaggtggttgctgcagaaaccaaagggaagtaagtctagttgtctggcaaataattagtggatgtctgttctaggcactaggtatacagttgtgaacaaagaacaaaatggtcataatacttgctggcatggagttagcatactgcgggaatactcacgaggtttttaatttgagagtagtgttggaggaattttttgtgtacggtagactttcagcttgattgtttgggatttgtcagttacttctgtgctccaaaccacagtcatcctggaagggaagaacttgaaaagtatcgttagagagtttcccctagtctccccattaaataaatgaattgtctttctctgcagtgagctaggtctaacagtttggtgtgctttgaggattcctgtttcttgctttatttaatcaactagtttttaatctgggaatgttttcagaccttgacatatcctatttttaattaaaagaaaaaaggagatgtgggttcaactatgagaaactgggagaaggggaataagaggatcagtggcatgaattccttagggaatcttttttcttccatctccctcaagcctcaattttagatagaaatgttgatttgtgagatctttttcctgatatatttgtggctttacaacctgctggggacagtaaaggacctagttcccagtaaacgtacgccctccccctatattttacctctttgggtggccatctctgtgtaggccctggttccaggctgacattggaagttccctgaggttggtgactgtctgatccacttccttgtaccccctcctggattaattggatgattaataaatgattgaccaggtgtaggggattaaaataacaagtataggagggcagggtgactttgaggttatgagccttgatgacaaggaatgaaagagtggtattattgatgaaattctaaaaatggagtcatttgtagggaggcctggtttgagtgaaaaacaaatataaacagggtgttaaaaagctgttaacattcaccaagttcaccctgtctggtggcaggaaaagaagtcagctcaggaaccatggcagtgggaggtgaaggagagagagggtattagaggttgtccagaatgttttagcaaggccaatcagaaacaaactatagggtccccttattatggggctgaagaccagaaagtcatccctgctaatttttaggtagcagatctttgtttctagaattctgttcttttaaaagccttgggaggcatcattcattcctgaaagtcaacttacacatttgcctctgtagtttggagagaaatatatttagtatccagtgtgtcaggttgcaggcaaggaagtagttaacacttttctctttgttctccacaattgaactgtttttgggggggcagttctactgcttctggaattacataattgtgtgggtcatctcctttgaaggtctgtccatgctttttttaaagcacatcgttgaaagaagggtgctctgtacaaatgctgacatgcttttctcttgggttatacgtgagcaattgtagaatgaacagacttcagggttttggtgttggtatagctttctgtgaatagtgaaggtattaggaggctaatgttaaggcagcaggtgaggtggttttcaggcaacacatctgaactcattaattgatcaagtatttatcagatgctctttcctatatactaattatctccccaaaggaattctttgcagcacaaaagtttaacacttaattatacattttgagttgttctccagtgtttttttggcttttttgtttgtttgttttttgaaacagggtcttgttctgtcgcccaggctagagtgtagtggtaccatcgcggctcgctgcagccttgaccttacgggcttatgcgatcctcccacctcagcctcctgaatagctgggactacaggcatgtgtcaccatgcccggccaatttttttggatttttttgcagagacggggttttgccatgttgcccaggccggtcttgagctcctggactcaagtgatccgcctgcctcagcctcccaaagtgccgggattacaggcatgagctaccaccccggcccagtgttttggttagtctcttctcctcatagatttcaaccgccttgaggatggtttacgtttctctgtgtttactgtgcagactggacatccatattcatagcagtaaagatttcttcattttacaaactgctttttgtttttttgagatggagtctcactctgttgcgcaggctggagtgcagtggtgcgatctcggctcactgcaacctctgtctcccaggttcgagcgattctcctgcctcagcctcccgagtagctgggattacaggcgcccaccaccacgcctggctaatttttgtatttttagtagagatgaagtttcactatgttggtcaggctggtctcgaactcctgaccacaagtgatctgcccactttggcctcacaaagtgttgggattgcaggcgtgagccacagcgtccggccaaactgctttcatgtaagatatcgcatactgtcaggaagattgtactcccattttacaaatgggaaagataagacctttggcaaccagtatgcatatggcagcaactgtacttgtatgtagtagtgatgttcagtcagctggggttcaaatgctaaatcagacaccggtatgatagcacatgttgagaggtgggaaacctcctaggattgcagacttgattaacttgccaaggaacagcaaacagcaacatgatagcaacagcccctttttggttcctccatccccatctcgttacaggtaccctaaagtcagcatgtatttgtgtactaatggaacaaaaatacgaacatgtgcatacagtcatgtgcagtgtaataacattttgctgcatatatgatggtggttccataagattataatggaactgaaaaatttctatcatctagtgacattgtagccatggtaaggtcatagcacaatgcattactcacctgtttgtggtgatgctgttacaaataaagctacagcatggccagttgtattagagtctagcacatacaattatgtatagtacataatacttgatgataataacagtgtttctggtttatatatttactataccatgttttttgtcatcaatatagactgtactccttctacttaggaaaaaactccccaaaaaaacagttaactgtaaaacagcctcaggcagatccttcagcaggttttccaggaggcattgttacaggaaataacagttctgttcctgcctttgaagactactagtgaaataagatgctgagatggaagatagtgatatagatgatccttaccctgtgtaggcctaggctaatgtgtgtgtttgtgtcttagtttttttaacaaaaaaagattttttaaaatagaaaatagcttatagataaggatataaagaaagaaaatattttgtcacagctgtatgtcttaacctaggtgttattacaaatgagtcaaaaagtttaaaataattaaaaagtttataaagtaaaaaagtcacagtaagctaaggttaatttatagaagaaaaaattttaaaaaatatgtagcctaagtgtacagtgtttataaagtctacagtaatgtacagtaatgtcctaggccttcacactccattcactcacttacccagggcaatttgcagtcctgcaagccccattcgtggtaagtgccctatacagatgtaccattttttatcttttataccatattgtattttttctatgtttaagtatgtttagatacacaattaccatcatgttagagttgcctacagtattcagtaacatatctgctgtacaggtttgtagcctaggctatgccatgtagctgaggtgtatagtaggctatgccatttaggtttatgtaagtacactctgtgatgtccacacaacaacattgcctaatgacacatttctcagaaagtatccacggaatcagagtgaccctgcttcagtctcagttctgccatgtatcagccatatgaccttgagcaaatttaacctctttgatacttagttgttttttttttttttttgagagggagtttcggtcttgttgcccaggctggagtgccatggcctgatctcggctcaccgcaacctctgcctcccaggttcaagcgattctcctacctcagcctcccaagtagctgggcttacaggcatgtggcaccatatccggctaatttttttgtatttttagtagagacggagtttctccatgttggtcaggctggtctcgaactcccgacctcaggtgatccacctgccttggcctcccaaagtgctggaattacaggcgtgagccaccgtgcctggccgatacttagttttatcatttgtaggatagaaatgatgttaacactacccatctatagaagggtggctaccaaaattttgattattgcctggtgtggggaattctggatgtgaatggtaaaggataaagggaactttaacttcttaaacttgctttttgtttcatttgaattttttgctattggcatgtataacttgaataatttattaaaattacatttaaaagtactcccttgtagaattttatgaaaatcaaatgaaatgggatatttaaaaagataggtatgtgtctgacaactaaaagatacttaaatggcagtttggggaagtattaattagtggctgacccttttgtagtgttaaatgttctgtctgactgtgtggcttcaggtaggtctcttaactttgttaagctccagcttctttaactgaaattgggagttaagagtagtgtgtattccacggggggttttgaggattaaatgattctagatggttaagcagttaactcagtatctggcacatagttaagtacccagtaaatattaactgttatcagcttttatcctcactatgcttgaagagaggaggcagtgagtgtaactttacctactttaaagttacagaaaatgaggcacagggtagtgggtgacttgtcctaaggctagatgttgggttagcagcagaaacggggctgacgcctacatggtctccttcatgtttcagtgcagccctgtcagagtgggtggcagcaaaccacggaggcttctcggatgtgcagacaggaagcactggccaggactgcggatgtgaagctcagcagaacatggccggtctggacagagggggttagcaagggtcaatgtggggctgagtgagtgagagaagccagcttagaaccacatcctttttccaccttccagggcagatggaccacatccagagtgatcaaaaggagaggcttgtttcctctctccgcctcctggtcttgtatgtggcacactctttaccactccccttgtgggctcagttctctgaactctgtcacatccagaaaattcaggtctggccttctctgtgaaaccatctctgctgctggagtcctcactgacagccacaccacccgcgtctgctcatcctctcccgctttcaacctggatggcctgtgtgaggatggctttgcttctctaaggaaggcctctctccctataccactttagtgctccccatggtgttccacctgctcccagaacaatctgcctgtttgtgggactgaatggttgagttgaagccagtcttggtgggaaataggtttggagcttctctgtgggctcctcttctgtgtatttgcattttgagaggggggaaaaaaagccctgagtgatttctgcctagtacggtttccagagaatgcgagattctcctcctcaaactcagtcctggggccagagctgattaagcccccggcttcccaccttcccaccttgggtttttacagtatacttcttatccttgccctttctgttctctgcttatcagaccttcccacatgtgccctgctctcttcctgctgcacaggggtcatgaaatacttaccaattagtgaaaaatacagacaatgcagtgtcaaattttaccaatctcagtttgcacagtggactggaagatggcatgtgccatcttcttgcaggacttgattgtttttgtgtttgcgtgtgtttcaaatatttccttttccaaatttgcgtttaatggtggctggcaaacccccatagttcacttttcatttttcgttgtagatattctttgaatatctccttgctatgggtattgggcttacatttaataattccccatcaggatctgaaaagtatgagggtgcctacctatgaagcacccatttttttcatgcttaataccaactaagtcaccagacttttttttcgagatagggtcttgttctgttgcccaaattggagtgcagtggcttgatcatagctcactatagcttcgaactcctggacttaagtgcttatcttcccagctcagcctcctaagcagctcggattacaggcacgcatcactatacctggctaattaaaaaaaaaaacgtgttttttttttgtcttgctgtgttccccaggttggtcttgaagccctggcctcaagtgatcctcctgctttggcctcccaaagtgctgggattacaggcatgagccactgcaactggcctgtcccacttctttagaggactctgctctgactcccactagcttggcaacaggtggatcctagaggatgttaaagacctcatggaagggaccctcttaactaattgcaaaataagaatgttcattggaaaagaaaccctcccaccaccatggtggaagtccctctaaaacacaagttgttcaggacttttattatgttgctctagtatttatctggtttttgaagatagtcttgcttaaattaattctgatttcaagagtgatgactaaaagttttggaggaggtgtttagaaaaggatgaagctctgggtttatttcagggctaatcatgaatttgcaggagcagcttcaggacaccagggagaggcatggcacactgccttggagctgtccttaggatgctgctaccttttagggacatactgtaggcagtccttggtctatgtaaagttgtgcctgggccttatcagaaattaaacagatgttatttatttatttattttttctttttgagacagagtctcactctgttccccaggctggagtgcagtggcaggatcttggctcaccacaagctccatgccattctcctgccacagcctcctgagtagctgagattacaggcgcccaccaccacgcctggctaattttttgtatttttagtagagatggggtttcaccgtgttagccaggatggtctcgatctcctgacctcatgatccgcctgcctcggcctcccaaagtgctgggattacaggcgtgagccaccgtgcccggcccagatggtatttctagtaaaagtggcagatgttcttgctgtcagaattaattttaatctttttacatgtaaatgtgggattatgggactctttttggggggtcttagtctcatatggaagtgctgctcttactttacagagattttatctatcccttgctcttacccaaagtgactttttttttttttgagatggagtctcgctctgtcacccagtctggagggcagtggcgtgatcttgactcactgcagtctttgtctcctgggttcaagcgattcttctgcctcagctcctacgtagctgggattacaggcacctgccaccacgcccaggtaatttttggatttttagtagagacggggtttcaccatgttggccaggctggtctggaactcctgacctcaggtgatccacccacctctgcctcccaaagtgctgggattacagacatgagccactgctctcggccccaaagtgactctgaactctgttttcccatcccctctgatcactttctctcaccacgtgggtcatttgtggtggcaaagtacaaagtgaccagccttctctctcatagaatttgaaggttgctgatggggctatgttactaatggggctgtgtgcttgctacagagatactgctggtgatgaaagtgtatgacatttctgttattcctttgggttaagacatctgtatttagcaggtattatacctagaaggagtgtctatatcagagtatcccagaaaagaaagaagaaaaatcccctggggagtgggaaaaggcagaaagtattgaatgtgtgccctgtgccaggcagtgtgctcagtgctttaactcggtaggctaatcttcactggataaatcaggaaaccaagctctgaaacatttcagtactgttaattactgtattggaactagaaccaaggttggagtgattctaaagcctgtggtgggtttttttttttttttttttgagacagggtatcactctgttgtccaggctggagtgcagtggggctatgtaggctcactgcagcctccgcctccccacctcagcccccaaccccagtagctgggactacaggcacataccactacacccagctaatttttgtattttttgaagagatggggttttgccatgttacccaggctggtcttgaactcctgggctcaagtgatctgccagccttggcctcccaaagtgctgggattacaagcatgagccactgagctcggttctgcctatggttattttatggcaggtaaagaatatgtggattcgaaagttgggtgggggatgaggtggtgagggaggcagagaacaaatgcctggagagaggagggtagggccaggtgggagttgcagtggaggggcacttgggagtgaatggtcctggtgagggtgtggaaaggaggggttggttagcaaaaacaagctgaagtggaagagaggttgggggtcccttggagggggtgtaatgttggatgatggcatttcttccctgagggacgagggatggaccagaggagcctggaggaccagataacctctgtatttaggtagatggccgttgggcccccacaggaagccttttaatccctggtatttatagactggcctgtactctactgaaaggcagctcccatatcagtcagcaaaggcaacattatctgcctttgaaacaccacctccgtggattaccatttggcccaatgggagggtctggataatgcccattatattatcctaattccctgctacctcagaggttgttaaggggcacttctgctgtttccctctgagtgacctctggctgccactctcttgcagatgctccttttcctctcagggatgagtcggagctgggactgggaaaggcagccctcttgtttctgttcaagttggccaggaatgcccaggaatgatgattctgttttgccagcttcttgccgtgaggctggggttgctgtgtttacagcacaaccaaccctaaagtcagtgcaattcactgtggatttattgagcacctgctagtatgtgcgtgtgttgggggtggtatatgaaaatgatggaggcaggtctctgccttaaatgagggagggtgggcaaacagctcccacggtcggcggttgaaccagttcctattctttctcataggaagtgtccataaacattgtcttgtctcatttgcatggttgttgagaggtttgaatgtagtggtaatgaattgagagtgcttctaaaggtattaagctcttgatttatgtaaaactttcttcagtattactaggcaggctgataataaaagctaacatatattgaatgctttctatttgccaggcactgccctaagtgctttctatatattagcttatttaatctttatagcaactttgaagtagattgcttgtgtacccacttaaaagaggattaaaaaaacttgccgaggatggcacagcaggtaagtagcagagccaggcagtctgaacgtttggccaaacactggccactgtaaagatcttgtggaagtcagggagtagaggtggtctctctcccccaagtgaaggcagcagccaggacctaccgtcagagaccagcaaggagcagagaaaggtcaggctggtgcctcagaaagcatcagcatttctgcacaacttaattaaattactgaaaccttttctgagcttggagccatctttcttggagagtaatacaattgaaacagataatttaagccaaggaggaaggacagaattggtgagctcacatatgtagatggacatgtaatgacgtctgactaaaacacagaggaaaaaccttaaagtgaatcatgtttattcaatttccaaacaagtgcaaagacccaggcagcgtgcttcatgtttggactcttgaagaacacacatggaaaaaaaaaaagaaaaaaacctcttcccctctcaacccttttctaagtttttattaagaatatattaatttgagcattaatatgcaatgtatccatctttgtcagttattttccagaaaaatctagctcattttttgaggcaacttctagccaagttgtttcagttgtggagaattggggtcaagcgtacatgctgatcatggaaaaagcaatcttaaatgcacgcctgtaaagaggactctgagagttcatgtttctgaattcttgttttactccactccattctgtcaacagctttcttaacatgaggtgcctgtgacttaaagtgattatctgtttccttagcaattcaggggacttaaccatcatctagtgacctgtgtccccaaagcttgctgtggcttcagaggtctcctggaatgccccaaggcagtgtcactcaaagtatgctttagcatcacctgggccaccttagactttcaaaatcagccctcacatgtgcatgttcagctggctttctgctgcttctcaagccaagtccaagtcccaccccacctcaagggggtgcatagctgcaagcagcaggggaacaatcttcagaccttcccatctctttttataatgatgcctcctagtccatagtatatctaggataattttaacatttaaaatgaattatgttatataaaatggaataaatttcaactctaccaagattgcatgcttttgggtcagactgtttagtttgatatcttggtctcatcactttctatctgtgtaagcttggataggttatttagcccttctgcttctgttttttgttttgttttgttttgcctaaaacggatataacagtacctaccttttaaggttgttgcaaggattaaataagatattagatgtaaaatgcttacatctgtgcgcagtgactaagcactcaaatgccagttaataataataattctgtgattatcctgaggtttcatgtttctggagtaggattatgaccacaacatttacagaatgaagtcctgcaggatgacaaaacatccctgtccccattgacacagccccaagtcacgggcttgcaaaagaatgtttgccatccctaggaagcctaacacagggcgctgggaaatgcttgcaaaagcagatattctcaggtcacatccttttagttttctgaggcccctgtgtttaaaggtacagcatgactgttctagggtggtcagaatctgtcacaggtgggagggaagtacttgtttagaatatggcagagaatccaccaaggtgttaataccaacaacagtttcttcttcattctgggctttttcctccccttatgcttgtttaatggttgggaaagagggctaaattgtacttttcctttgtaaaggtgcacatctcaaatttgtttcccctagtagcttgttttttaaaaagttttaagacatgacaaattatacttctttttggaagaaagattaggaaatacaggttaatggcaacccttccagagagcaccactgttcaccctgctattgccctgctgcttctctccctggtctaggatgtcagggacggcagagtggccaggtggaggggtcaggcttcagagggaggagctgcatttctgggagccaggctggccctcctgttgctctcagggctgacacttctctgtctcatccctcctccctcagtaaatgcagctggggaggattgcctagaaggggaaaactcatcgtgtaaggagaacacttccctcgtggcttttaaaatgtaatgcttccttccccttttctcttcttcccagagtaagagctgccagtaaaacttcagtgcaggactgttgagacgtatttgtcatgatgtgatggacaaaagaattgtcagctcctcctttctgtatcatctcattgatccccctttacccccttgcaaatgagaattacaggaaatcacaactagcattaaaaaaaaaaaacaaaacactgggcagatgggaaggatgaaatgtgtaacccccgttcccagaaacaggcagaatggctgagatgactgaccctagcatttggtgttcactgagccaaagcattgcctgaagataatgacaccgtctggaaatcaaaacctgagtcttcctgctctcatccaaaactcccctcttttgagcttctccaatctagtcagtgacccgccctcccagttctttctttcacaggttcctatctccaccaccctaaccagaccttgtcatccgctggccttccaggctgtttcaatctctcttgccaggttcaccctgctagaacacggttctcctctccggtgagactaggtaagagaaaaaagccctatgtgtatgaggtagcattcctatcccttcctatggtagaggtgttccttcaggatattcttggtcctcaaatataggaggcctttaggaaatgattgttgaactggattaggtcaggtttcctgctcaagaatatttgttgacttcccactacttactgatccaaggcagaatttctctgcctgtttttcatggctgtgcaaactggccttaccttaaatattcagttgaatactcaatactttgtggaatagccagagtctgctatgtgacagatgctaagaaaaccagcaagaactgtcccttgccctgacagatttcagaatggagtttattttctgttcttccctgatccttggcctctcttcccgaccttaccctgccaccccctatctagcatgtttgcttcggcattcctgccccagaaggaatgttccctctttacaccctcatacttattcagccctcaaagctttcaggtcagatctcctttctttcctttttaaggcgctctttgattatcttggttcagattaatttctttttttcctattttttcattattttgttcataactcacaaatagctgcagcttattcttccttatattctaatcattcatatctcactggttagcattttattgcacccatgtagaatactgaaatagacatgattgccttattgtgtgttttgattgtttgctgtttgggtttgcagcctcctcaactccactgaaattcttggtaggctggggattgtgccttctttgcattttaaagctgtatatagaagattgtcaggaaatgatgatacatggaataaacaaatgtgaaccattggaggtgaaaggcgacctgatagtactttgggagtgcagttcccagtaggattttgggtggcctggagcacagcagcagctggaggctggggaccatccagttttaggactctggtgaccaagacctgagagaaagtggaaaggtcaggaagggtcagacttgtctcccaagagtttgtattatcatgggattctcttgaaactctggttcatgtggaaaatgtgcttatcctagaagttgactagggttcttggggaatgatggtgaggccagatgcctctgtttgatccaggttctctgcatggtgaatcaccccagaaggagggtgtgaaaggtgcctggccacagggaagcttatagcttcagggaatgaactcttaggagcaatggtaagcagacctgtcagattgaggatttgatttatttgtattattggcacttgtattgatttttctggggagtttggggatttgaatgtattttgcaaatacaaacattttctttgtcatgtcactgatgtggtttataggcttatgttgcattttttctttgaatagtagaatcttgcatgaaattaaaagcagtatcctccacttctgacttggtagggctttaagcatcatgctaacttttcccctccatctccctttcatttcttagatccacctaggactgtgaaataggttggtaacatctgtgggctaggacggtttcagccagctaaattccctgttacacagtttagatttatgaggcacatctaaatttactggaattctaggtaggaagtgtggttgcaaaggcaaaactctttgtgattgtagcttgtatgaaaatagaagcagcttgaatttttttctcacaaactttatccaaaacatgtctttacatcttttatttttggtaaatggattttggggtggcatccccactactgttgggatgaagggatataacaagctagagggtgatttcacagaatcctgagcctttgaaaaatgctgttgcttttgaaaagtaataaatatagaagccaggccacctttttcagatttataccctcttcccattctattctcagctagtaaatactatggcctcagtttgcctaaaaagataatggcttaagtttatttaaatgtcagcagtagtttggtaatgaattaagtcctttgatgatgatgatgacgacgatgaagatgatgataatgttgatgatgatggaggacactcagtagcagtggactgagttgtggactagttctttctaaggctcccaggaagaaaattgctaactcacttaatatgtgaaggccttagtgtcaggtagaggaggaagcagctgtggagtgtaaagaaatcatctgcccaaaggtacactttagagaaagactttggatgaagttgtgtgttttctttttggaatagggtgtattgcttcttttgagaaggccttttacaatagtacaatagttcctctggaactcatagcaggattctttttccaccctcttctatatttacagctgcttttcccctaggggagcattcatctgttttaaaaagcagggagagaaaacaagttctctcaaacagtgaggtttggaaattagaactgtacttacttgcctttcaggaggacatattctaaagagttgttttttgggtggaagagaaggaagtcatctcctctgcccccactccacccaaggcacaccacacacacacacacacacacacacacacacacacacacacacacacacattttcacctccacccagaggttccttgtggcagatgtgaaggagtttagaacacagggttcccattataacccctttgttgtacgagaccaaacatggcttttcagccctagagtaaatctttttctggcaggccactttcttggcctttatatccatgtctagggccctgggctggcattggccctgaaggccagggccagcctttggggattgcacttgagcatgtggtcagggacagcatctgagggcattttggacaggaaagatttctgattattaggctgttttcatcacacctatgcttcagggtcatagaactgaggattgccagggactgagatgaatttagtaagttggtttaaccccagtgcctcttattctctttctgcacagtttttagtcagctagtgggtgtggacatgcatctttgttttactatgagaagaggaggaattgtgccttagcagttgaataactgtgccttctatttagattctgtagagggttacactcaaagctaatgagtgctttcttccactctgcacacactcttgctgcctggagtgggcggcaggctatagaaccacaatagagcaagtactgttgctgttgaaggcatagacggaggtgacagtaagggcagctaggccctgaaattccagtggctcagacccctggctgatggcttacctcctgaggtgagaccaagaggaaggccttcagcttccctgaaatgagtgcttctcacagttaaggtagtgtgaccagccaggggtagggactggcttcctgaggaagagggtgggagagccttaattaagcctgcctggtttggcagtacctcagactcgcctcctctttctgtgttggctgataatttccttcagctcttagaacaactcttcatttcctgggggaacccattgttgccaatatacactcacagagcctatctccggtactgccatgtgtgctttctgcctcctttccagaagaggcaggtagccagtctttttttctcatgagctgttcctaccttgttggagttcctggaggctagtgctgctggacctccagtctggcagaggcctggacgagagctattccttgggttctcagaacagacctagcctagtggagaacagttctgggcctggctctgtgtccagaagggctcagtcagtggtcagattctgattgggagatatatgaggaaactttgtttggtgagagttaggagaatggggttctggttcagccattctctcaagaagtcatgatcatttgataggcctcagttttcctctcctaaaatgggtagattggattttataagatgatcccaaagttccttaaggcagtaatgtgttaggattccgtgacaaacccgggagtctgcccctggtctaggtgaccaaagttagcaaaggctgggacagcacagattgcagttcccaggtctcttttgcctcccagctttttgatgtgtttcttctccttggaatgccccaccactccctgtacccacctctttctgctctgtctggctaataccttctaaagccaggtatcagcttagactgccgcttgccccatacttgtgtgggtgcctctccttggtgctggcattacaccctgtgctcagtacttaccgcaccatattaccgtctgtttccttgttcttcctgaccttacctgagcttcttgagggcagagactgtctgctatcaccactgtatccctcattgctggtgcagtgcctgggatgtggtatatacacagcaaatgttgaaggaatgaatgtccccccctaaccagggtcagcataccccagtgcgctctgggaactgttctctgaccctctccacccttaccctgcctaaggctctctctttctgagctgtgtgtgggtgctggagagccttggataatgctgagttgtttttgaagtgtgtctcattgtggcaaagcattgggtgatgttgccatccccacccccaggacactcttgcaagaattgcttccaccagggatgggcattgactttgacctggtcctcctcatctccagccctggaggaggggcaggcaagcacgtgcagattgctgtcctctgaccagctgcccagggctgggccatctgctgcttgtgacagcgggtggggtgagaggggtgagtgacctgtgcaggggagggagtgtggggcagcagcatagtcacttcagtgcactgactgcatgacagagtccagccccccttctccccacgttctatcttcttttccagtgctcagttatgctatgcttcatccaggtcttggttttgttccagctgctgccccccaccactctgctaggagaactcttgctgtgtttttgttaactctgtgtgtgtgctttgcccttttgcctatgcctccaagaatctttatgttacataagacagcagcagcaaaaaacagaaacaaaaacaaaaaatgttagaaatgaaactttggacccttgttattctctgttcagatgcaaatgatgaatctctttccatcagagtttatacctttctgtttaccaccccgttttctgtccctcctcctggagagcctttgaatggcagggatgggctgaatcactcacttggaaggactgtaatttagcttgtgcttcaaaccttgcctctttctggccttgtaaggacctaagaaagacgcaaaaaggaagtaatctacccccatcactcttggtgtgagtttgaaggttctgaactggggtggggtggggagtgtgtgtgtgtgtgtgtgtgtgtgtgtgtgtgtgtgtaattgtgtgtgtgtgggattgaaggatgagggttgtggacagtcttaaaagccacctttaccaaatgaagaggtgacaaagcagggactggaagggcagcataccctaaccaggacttccccaaactttaacatgcatatgaatcacctggggaaccttactaaaatgcagattctgattcagtagatctgggatgaaggctgaaattcttcatttctaacaagctcccaggtgctgccagtgctgctgttaatggaccatactttgaatagtaaggctgtgtccttcctattccaccttttaatagttgatttaaaagactgacctagggaaggcaagacaggggctagtcaggacttgcgtaatttaaacccaaggtcctgggctggcttctcagccagtgtctacagagccttttaggcgggcccctcttatctaagctgctggcttctctgagctcctttggtccagtttggtttccaaggtataagaaccacagcccttcagagggtgtgtgtgcttactcacaacaagattgggtccttgcccgtttctctttggatcattagaagtagataaggccaggccgggtgcagtggctcacgcctgtaatcccagcactttgggaggctgaggcgggtggatcacaaggtcaggagattgaggtctcgatcctggctaacacggtgaaaccccgtctctactaaaaatacaaaaaattagccaggcgttgtggcgggcacctgtagtcccagctactcgggaggctgaggcaggagaatggcgtgaacccgggaggcggagcttgcagtgagccgggatccagcctgggcaacacagcgagactccgtctcaaaaaaaaaaaaaaaaaaaaaaaaaagaaataaggccaaacctagcgtttaaaacagaagtttagagctgaaagaacttttactcttttccagtttattttactgagggggaaatgggcccagaaaagttttgttacatgtccagaatcacagccaggggcagagctggggtgaaaaaccagatatcttaattcccaagcccctctctgagggagtgtaaacctgagttagagatgagagaatcacagagttggtctggggacatgctggttggacaaaaaggctttccagtggtttgggggagttttgcaccacatgtacaactaaggtggatcaactgacatcttggcagcccatcctttgttcacttaggccagggctttcatctgcagcatcactgatgttggatcaagtgattctttgttgtatggggttgtcctgtgtgttgtgggatgtttagttgacatgccttgctctatccattagataccagtagcaccttacccccaaggtgtgacaaccaaatatgcctctagacattgccaaatgggggaggtggcacaaaattggtcccagttagaaaaccactggttcaggcaactagtattttggggaagagagtccctctggggcacctacactgtttttttttttttttttttttttgcggggggaagtgtgcattagtctcagattataaaggtagcatgggtaccagccttcctgggagtttatttacagtttagtttatagtttagtgggggagggaggaaccacgaaactattaactatagactcccgggaaagctcccaccttaatgcctcctccaggatgtgtagagacccaggctggactctgaagaatggggtcaaagcccagggtgcttaatgaggaagagattttgctgtcctgggctggattgcatagctaagaactgagtaactatcattcacttactccttaagagaattcttccattctgaaaaaaatttatatatatatacacacacacatataatatataatatatatatttggagacaagatcttactctgttgcccaggttggagtgcagtagcacaatcatagcttactgtaacctcgaactccttggctcaagtgatttctcctgtctcagtctcccgagtagccaggactacaggtgcacaccaccacacctggctgattttctttttattttttgtagagacagggtctcactctgttgcccaggtggtttcaaactcctcaccttgagtgatccttctgcctcagcctcccaaagcactgggattacaggcatgagccactgcacctggtgtgaaaaataaattttatctgaatttgtagagggcagtgagacacattaaccaacaaatatctacacttgaagggagagagaccagctcaagcctgacattggtagactaactccttattttttatttctaacttgattttattctgatatgggatgaatcctctgatagcttttcctgtctcttttccagtgtgttaagtgattattgctgtaagactggaattacagtctgtaacgttctgaggacatagatataaaacatgggtaaatgccctttttagatgtgagcctaagaaagggtttttatcctttttcagtttcagaggatactgtacttgcaaatgcttttaaggccacagagttctcacccttgtactcaacactaggccttcctaaatattattccagtgcacaaaaagcattagtgatggaatggagcctccattgcctcctggcttgcattattcctgacactgaatctgctgtaattctttgctcctctgtctgccatgtgtctaattccctgccccatggctacttttaggattttctttatcactgtttttttaacatttcgattatgatgtaccttgtgttttctttttgtgtttcttcttcttcttggggtttgatgagcttcttgtatctgtttgtgcataattttcatataatttggaaaatttggggcattcttttctcaatattttttctgtgccttgctacctctccccaaccattactcctgttctattaggctgcttgatatatcctacagttcagtgatgttctgttcttttttcagtcttttttctcagtgtataattttggataatttcttttgcaaatttactatttttttcttctgcattgtctaatctgctgttaatcctatcctgtgtactttttatttcaggtattggtattcttccctctagaagttcaatttgaatatttgaatctttattttttttgagacagggtctcgctctgccacccaggctggagtgcagtgctgtgatcatagctcgttgcagcctcaacctcctgggctcaagcagtcctcccacctcagtctcctgagtagctgagattacaggtgcatgccactacacccagataatttaaaaaaaatttttttttttttgtagagaggagggggggtctccctatgttgcccaggctggtctcgaactcctggaatcaagagatcctcctgccttggcctcccaaagtgctggggttacaggcacaagccactgtgcctagccacttcaaatattctttatgacttttctctcttcatcatgctcgtgctttgttcttcttgaacacatggagtatatttataatagagatttaacatccttgtctactagttctgtcatctgtcatttcttgatctgtttctgttgtttgattattctcctagttttggctcatatcttcctgggctttattttgcatgcctgttaattttttattgaaagccaatcatagttctaccttgctgggtgctggaactttttgtattttttaaaatacttttgggctttgttctcaggagcagttcagttacttggaattggtttgatcctttcatggcttacttttaagctttgttagggtgagtccggaatagctaacataactaagctggtcccacttggaggcaaaaaccttctgaagattccatccagtgccctgtgtattagaagacttttctgccttggctggtgggagcatgtattagtctgttttcacactgctgatgaagacatactcaagactgggaagaaaaagaggtttgattggacttacagttccacatggctggggaggcctcagaatcatggcaggaagtgaaaggcacttcttacatggtggcggcaagagaaatgaggaagaagcaaaagtggaaacccctgataaacccatcagatcttgtgagacttattcactatcatgagaatagcatgggaaagaccagcacccgtgattcaattaccccgccccccgcccccctgctgggtccctcccacaacacgagagaattctgggcgatacaattcaaggtgagatttggttggggacacagccaaaccatatcagagcatgaactatttctgactctgagtgagttctaggggttgtgccacccacttctttctgatcattattttcccacccttgctagtttcctcagaggcatgcacagatcagtactcagcccaaaactcaaaggggtccctctgcagatgtttggtggttttgctctttgcagctctctccttttcaattaatttgccctgcaaattctagccacttgggcctctccaaatttccaactctgttttttcaactgagtgacattgctgaactctttcaggtttctctgccctaccctatggtctggaaactctcaagggagttaagtggggcagtagtagggctcactgcgttttttcccccatttctcaaggattactgccctgtgctgcctgttgtccaatgtctgaaaaccgttattttatctggtttttcagttgtttagggaaggagaataagttgagtccccattattccaccatgactagaggtagatattcctcagctgtccctcaaatcaggtattaaccttggatgtcttttccttctgtgttcacttattgaaacatggatcatttagacaaatcttatggtaattcagccagattcacatcatgtcagtttgccaaatatttatctggcacctgctatgtccaaaagaatagtatagccagtatcttgctgaacgtggtataatctgtaactttacccatattctaatgctgcaccttctagcagaagattctgtgcatcctgacatgcatgtgacacaaatacactttgagtcttcttcctgtacctcctgatcatggtcccattaaacctgggcaaacaactgaactaactagtcagaattggtgagcaaacagcaggtgcttggctgtctgcctattcatgagtcaggcccagacagccgtgtgtggggagggaagagagcattaagtctctgtgtgtgggtgagcacctccattttacctggccttattctgtgccagatactatattcaatttcaaaaatgtgtgactcattgactctgtaattccatgaagtataggtctgttacctcaattttatatgtgacaaacagaggctcacaacagtaaagcagcatacctaggccctgtgagaagctagaggtagagtcaggatttgaattcccttttgtgtgactccagagactatgtactattcactagactacattgattgaccctgtaattttctctgtcacttccctcttctggactccagcttatcttcctgttttatctttgacacgttggctgtatatctcccatgacttttcactttgtacctcatgttgtaattatttgtgtttgtgtcttatatatatacacaatatacagtagaccgtaaactcttaagggcgtatgcttcctttacctctcaaggaatctcgtacatgtaggtgcccaatgtatgtgttgaatagtcactgagttccttaagaaagaagcatgttaggaatgagttcataagccctgtctggagggaaatatcaaattctctcattaatttatgatgtttcttcttcatcttctctgtgtttatcataatcccttttaacatattccagaatgttgcctgaattaattaattaattatggctgggcacggtggctcacacctgtaatcccagcactttggtaggctgaggctggtggatcacgaggtcaagagatcgagaccatcctggccaacatggtgaaaccctgtctcttctagaaatagaaaaattagctgggcttgggggcgtgtgcctgtagtcccagctactcgggaggctgaggcaggagaatcgcttgaagcaggaagttgcagtgagccaagattatgccactgcactccagccttgcgacagagtgagactccgtctcaaaaaaaaaaaaaattaattatttctcaggacgtgtcctcatctgatttgcctggattttataaagttattcatttggtgcctttgtctgaactttgcctaatttggattacttttggaatctctatttggacgtttgaaggactctcctttatgttaattagtttaagcaaactccttgattcctgatttagggccccacatgcagggaactggaagtatgactggagctagaactagaacatatagaccttggcagagggactttgtacaattagaaggtgaggtaagggtataggtggcggcaggggcatggggctaatcaaagggaaggaacagtgggcaagttcctacttctcatttttgcttgtacctcacagtcccaccttgacagcttacaggaagcttgggtaatttatgatgaagaggacaggaggaatcatggtttggttataaattaggaggcttcctggaagttacacaagatggagaatatttggagccagaagacaggatcttgtttggcttgagtgtgcacctcattggggctgttaagcttcattagatggaggtgaagacatgtccctggaatcctaaacctgaaactcaggggaaaatactcaggttagtttctgactagaaaggagggaaatggcagaaactgggaccatatgtatggagaaccttaaggcctcagatgtattagggaaggtcacctctttggccctgccactaggctattttttttccattcatgaatcctatagaagaggtaacaatttcaggggaggggatgatggggtagagagactttgttgttgttgaacactaaggaagcaggaaactttaagctgtatccccaacttttacctagcttttgctaaacacagagtgtggaagtgttagttcagagagactttccatggaagaggtggagggtgtctctgagctatctggaccatttaggaagccttaactcaaatcattgggttaattgagaaggtataccttataagacacaaaccccctctagttatcatccagtctttcttctcccttctttttcactcccttccccaaatagttttgcccttattacgtccactttctcacttttttttttttttgagacagcatctcgctctgtcacccaggctggagtgcaatggcgcgatctcagctcactgtaacctccgcctccctgcttcaagcgattctcctgcctcagccttccaagtagctgggactacaggtgtgcaccaccacgcctggataatttttgtatttttagtagagatggggtttcaccgtgttggccaggttagtctggagctcctgacctcaggtgatccgcccgccttggcctcccaaagtgctgggattacaagcgtgagccactgcgcctggcctcccacttttaattcatgttaaatttgatataatctgccttcaccactccgataaaactgttcttgattaggtcaccagtgatttcctagtggccagatccagtgggcctttttcagtcttcgtctttctgggcctttgctgtatctgccacttctcatgttttccttgagtctctctgtccctctcttgacatctgtgttgcacatgcccctggtttccatgtaccttttggagtatctctcataggctttccttcctcagtatgcccattataagttagcattctccctaggattctgtccttaactttcttctcaacctgtcctctttcctaggtgagctcatctattttgcatggtttcaactgtcacttacaggttgatcactccagggctacatcactccagggctacatcccaagctcagagtgctctatagggtttcacattcatttctaatttgcctgctagacctttctaccagttatccctcaggtaccccagctcaacatattaaagaataatctgaatgaaattcattatgttccctgaccaaacctgcttattcacctgtattctttttctcctgtggtagcttctaccatttatgcagttacttaggccaaaaacttaggcttttttttttccatctttttttttttttttttttttgagacagggtatcactctgtcgcccaggctggagtgcagcggtgcaatcttggctcactgcaagctctgcttcccaggttcacaccattctcctgcctcagcctccctagtagctgggactacaggcacccgccaccatgcccggctaattttttgtatttttagtagagacggggtttcaccatgttagccaggatggtctcgaactcctgacctcgtgatccgcccgccttggcttcccaaagtgctcggattacaggcatgagccacagtgcccagccccaggcatcatcctttattgttctcactcacctcatcctattagtttttgatatattctatagcatttggcacatcacaggcactgaatgaatgaatggatggatggatgaaaatgtttgtttatttcatccaaatttaattacaattaagtaccttggccttggtgaagctgaatgctcctggttacactaacttttgggaaggtcatttgatttttggccacactgaaattatatcaggaagactcttttgaaagataaatactttgttggaaggattagtcattattagaaaggggtggattggtcactctgctatcttttagggctctctaaggaactgctgagaagtttgtttatacagttagaggtgaggtgggtgaagtcaaattgtgctggctggtggagtgggggtggggttgtccatggtgctcatgggagtacagatagtgtgttggtgaacttgccacaatgctacggatttaatgcaagaaataggcaaagcttttctgctgggggaagtaatatgccccatttcactcactaatggatgtcctaattgtatgctagtatttctaacataaaggctgaggatgtgtatttaaccgttttgccaagtttatctcccttttcttgctgtccaaccccctggaaaaaaaaaaaaggaaaaaaggagaaggtgacttaaagaatcaggatttgggctgggtacagtggctcacgcctgtaatcccagcacttcgggaggccaaggcaggcagatcacatgagaccagaagtttgagaccagcctggccaacatggtgaaaccctgtctctactgaaaatacaaaaattagtcgggcttggtggcgcacacctgtacttctagctaatcgggtggctgaggcgtgagaatcacttgaacccgagaggcagaggttgccgtgagccgagattgcgccactgcaccccagcctgagcgacagagcatctcaggaaaaaaaaaataaagaatcaggatatcaggatttggaaccagagaagctcttcaagtagagatcgtctggtccagccctgcattttcagatgatgatgacaataataatgatagatggtgatgaatataatagtaactactatttttgatgacttactaagtcacaggcactatgctatgtactttatatatatttccccatataatacttaaaatatccctgtgagataggcattattaagtaccattttatagaaaggaaatagaggtccggaaagcttggataactacattgaggtaaagagaatgctgaagtagctatcacgcagagagatgaagcagcctccttgttcaaggtcaagttttccagttaaaggagaaacacaagtagaatccaagtctcttgaccttgagctcagttgagcacctattttttgttttgacctgagaactcactttctctggtcatttttgtcttatttctcactatccttttaatttcagtaaaattgaatgaaatagagggaaggatggtttagagttggggtttttggtgagtttttaaagtttatttttaaataggcagctttcccagactgactgggaatgtagcagaaggcctgagaaccaggaagtgacacagacctgtttataccatcccactcccaggcctttggaaaacgatccacagagatggtaaaaagtaaacataactgcatcagccagctctctagggtttgctatttttgacctggaggaggtgtttcctgcatagctgtaagtactcggaataccaaaatttagctcctaaacattctttgagtgaaggtatatagacagacagacattttttgttaccagacagcagcattcagtgactgtaggcagacaaaattaagttttttttccctcctctctctgccatccttttggtgagttgttcttccatttctttatctttctttgtaagtagcactgtgcatgcaaaacactgtcctgggagctctaaatttgtgcatgggttcaaggtccaactcaaagctttctctttcacttctccctactcccatcagaagtctttgttcctgtgtcctctgtgttctcatagcactttttaaaaaaccttctttggggccctagtaacaatttgacagtgttatatagataaacataattcctctcacgtaagttgtgaattccttgagagtaagaattgaactgtgccccaattcatctctatgatcacccaagccttgcatagaagacagccagtaaatattagctgaattgcagtatagtcattggagacacagagccctaagaagtcagctttagcaaatcggcttcccggactttatttgccaactgggtattgaagcctgttccactcagccctgatgggaaccaagcagagagatgtgatgacacatgagatatatctctagggtctaggaaccaattacagtcgcctctgccaagcatctgttttgctacctggccaaaatttcaggatttatataatcttttccctcttgttttatacatgctgttattttgccattttgtatttttctatacaaattatatcttgtgagtttatctttttttctcattcactcgagaagtattgttgagcacttgggggcagagaattggtggtctctgcaggagtttattacctgcggaaatgcagcatacaaaagttaaataactgtgagtggccttcggggagggatatgattgactgtcctattcctggtccaggcagggatgctgagggtttggaagagccttccatgcctttgggctgaactgagaaattctccccaaactaagatgggaactaagcttgaccttttatttggaaaacaaaagagcagggagccctattagggaagcaggaggaggaaagacttccaggcctcttgaattccatttatctgtaaaatggggctaattccacctatttaatgaggtaatgagtgtgtgtatgtgtatattcccttagtctgccagaaactaatattattttaggatagtcacaaacaatagctgtttaatttggaggggaggtagtgctaagtgctttaaaaaatttttagaatttgatgggaaagaatgtgggaggctcacttgtttaacctgttggctgttctcttgtctaaactaacattgtgttttgagcctagtctcaggcagtgtttccaaaccagctgaaacagtgccctttggggagtctagtgggggtcagtcacggcctgttagaacaggaaggggcttagccagcatgaatttgagcacccactgtttcatacatcgtcctacatgtctcacgtttgtcttaatttcactgcacagcaacccaatgaggtgggtatcatttatccagtttacagacggcgactgtacctagaccacccaattgccctagaccacccaattgatagtatctgccataatttttccatgatactggcctccctgagagatacatagttcaagtgttctgttttactgatgagaaaacaggcatggaagcaaagtgcttgtccaaggttggcccctcagtcatgttgaagctgggtttggagaaggggtttcctaccttcaggtcaggaacttacgacaggctttgttcctgctcacaggcactttgcctcctcccccctctttttctgtctggtcttatttgttctctcttgccttctctcttgcatcttttctccctttctccctgggcccctgtatctctgcagtgtgcagaggctgggttttgttgttgttgttgttgttgttaagatgtgttattttttgaaagcattttaggaacactgtgtacggatagtccatacaaatgtgctgatggattgattaaaccctaaagggaaagtggactgtcctgggtttgctgcaatgcagagggatatggatggtagggatccgtcttgggaagatgtaggggaatgtgctgctcagtcagaacaatgaggatagagttaatgttgcttccttccagtcagagcctgtgttgacttactttttagaggaaatacttttgggcccctcctattccctagaagacattccagttttcttacagctgaaaggtcctttggggatcatccaggttcacccctgagacagaaagactcactgacttgcctgaggccaaaccgcttttcagtggctaggacctaggctgtccctcctgtcctgtgatcaggtccctgctgcagtcatcctgctgttaggtgctagagacttgttaaagagaagacttaggtggggtggtagtgtgtctgctggctttcctgttgtctgaagttggggaaagcgtgttgcccagatgatgtgagcaattctgggggtggaagacaagggcgcagggaatatcaaagcaattcaaaaaaacctctgacactgtgtaatggcttaggtggcttaagaggaaagctgagggtaatgtttgtgatttggaggctgtgtgattttaacaggagtttgatgtttgccttttcaagtaggagctggagattaaaggaaatggataagttaatattctggcctgaaaggatgtcagagtccggtaaaatatgtggctgtcgaagcactcaagtgttagtggcaaaaaggaaaggggaagatatagaagttagtaggactggaagaatccattgatccacaatgggagaagatagaaggcatctataaataactgaattttggggggtaggaggcattaaggtccaataagtgtttagatatgttttgatactgtagcctggccatttcagggtgagtaggagtacagaggggagatgttgcagggaagaaagagaggttaaggaagggcctgggcagctttggctgtattagtcatttctcttacttatcacacccctctggggaactttggacttcaaagtgttaggacttgttatcattacaacctgaaatgtaattagcgggttaatttctgttcatgtttctggaactgttctttgtcctttctcatcatgtggcaggatcaaggttggtgaacatagttaattaaaggaataaactctgttgttctggactctcaccactactaccattatcctctgtctagattagtctgaggcaagaaaaggatttatgttggttttatcatcccagttccctctcttaactaatggacagaggagccatggtttaggaaaaaatttgttctaaaaattacatgtagaggtcgagacaggcagatcacttgaggtcaggagttagagaccagcttgattgacatggcaaaaccctgtctctactaaaaatacaaaaattagccagtcatggtggcgtgcgcctgtagtcccagctactcaggaggctgaggcacgagaatcacttgaagccaggaggcaaaggctgccgtgacccaagattgtgccactcccactgcactccagcctgggcaacagagtgagactctgtctcggaaaaaataaataaataaataaataaaaataaaaattacatgtaaacggagtctgactttacccacgcagcacctgggagccacgcttgactgaatcagacccctcttgcctttaggagaagtgtttgatagtgtttgatagtgtgagatgaccttgcaccttcagcaggactatggcattctcagcaggggtgggccccaggcacgtggactgaggagatctgggccctggctgtttcctggctggccctagctgctgctgctgttgcctcccaaggccagagccatttttgaaggtgactccagggcacctttaaacttattagcaggctcttgggttaacttggaagcatctgtggcaacaacaagcaagtaaaccatgtgaactttgggcttgtgttgcaggcccttaccagaagcccaccgtgcgtgtcatcatttctcagccctctgctgtcttggcttctggctaagacaataaacataagccccaggtgtttctagtttacaaagcatttcctcatattttgttccttttgagcctcaacagagtctacggagatagtcaaagcaagtaacagccccattttacaaatgaggaaacaggggcagagatgaagtaagtgacttcctcaaggtcagagctgtggcttgagggcagttttcttcctcattggaggaacttacggacaggaagtgagtgtccacgacatcacattcagtagggcagtcacccagctgttgatattctaggtttacagaggtgggagaggctgcccttttggggctgacggtcgagctgaggcctcctgctaccaccaggtgttggggcagcagcactagttcccaagaaataaaatcagaacggtgactctccttacctgtgttttgaagaggaaagccggctattggggtaagagatggattacagcaagagaagggtagaagcggtgaagaattctgtggccttagagcctttttcagatgtggaaacagaaggcagagagccttcatgaccagctccctggctggtggcggaggtgggactgagtcattgaggccctctcctctgtctcagctctaagttcagatgtgatattccttgtgaggatggccgagtgctagttttgaacttgatgcttagttctaggttcctcttcagtgataattttttttaattaggaggagtagtcactaacatgccaaaggaatactgaagtgaaatggattctttttgtttaaacaaagttttagcctcagtatttctctagggataatgaatacctagtgaaacttttttttttttttttttttttgcttggtgtactaaagccacaatccaaggacaagtcttgtttttttaaattctatattcaaggcagattatttcttaaaatgattagatttatactgtggccctttctccacagtagctgggttctcccattctgggcaatactttggagatttaggggttagctttcctctgttttatttctgaagcagtaacccttggcctagccttacatataaacaccccactgactaccttctatttatcttttctttgcaaagccctcatttccatcaccccgtctgttctgcacctgtcccgtcttaggcttcaggatggaattggttcctcgactcaggtagctgcttaagcagtaagggaggagccagctattcctgcaaagcaaaaccaaaaacaaacaaaaaacctaaaactgatcaggaactcatacatgtacatcttgtctgctccatttccataccggctcctccccacagtattcatgattttggcagacctttgctacctgcctgtcagatgccaggccttgtgctggctattgaagattccgagttgagtaattcactgtccctgccttcaaggaagtctcagcctggtgtggtgagacagataaacaaatagatacaataacctgttaaaggtacagtcatagcagggtaagaaggggtcatttctacgttggaggtgggtgtggtgtgaagtgtcaggaaagaattcctctagatgacccttgtgctgagcccctaaaatgactctattcctggtagagggagcaattaggtttttgggatttgttttaatggcagtttgttgagagaggagacaagtggtctataggaaggccttgctacattaacttaacattttgtttgaatagataatacatgtacaaagtacaacactcaatatagtaaaagggaatatatgcagttaaaaattttttttctccttccccgttaaccactcagttcccctccctgaaggcgaccattagttaccaatttcttttttttttttttttttggtgtgtgtgtgtgtgtgtgtgaaacagagtctcattctgtcacccaggctggagtgcagtggcacaatatcggctcaccacaacctccgcctcctgggttcaagcgattctcctgcctcagcctcctgagtagctgggattacaggtgcccgccaccacacctggctaatttttgtatatctagtagagacggggtttcaccgttttggccaggctggccttgaactcctcaccttgtgatccacccgcctcggcctcccaaagtgctgggattataggcatgagccactgtgcccggcagttaccaatttcttatgctttattccaggtgagtttttccgtgcttataggggtgtgtgtgtgtgtctgtctttcaaaaatacatgcatatacccaggttatttttttcacatactaattttagaagtcattccatattagcacaggttgaattgccctgttctttttaaacctctgtacggtattccattatattgggtgtactataacttatttaagtatactcccctttcatgaacttttaggttacttcagtcttttgcctttacaaacaatacatgaatatctttcatatatgtcattgcacatgtgatttcttagggcacattctagaactgataagtcagagtatatgtgcatttttttggaatagttattaacaagttgctctccgaaggattctatattgattataaaatgctagccaggcagagtggctcatccctctaatttcagccctttgggaggctgagttaggagtatcacttgaggccagaagtttgagagcagcctgggcgacatagtgagacatcctctctctttaaaagaaaaaaaaaaaaagttaggtgtggtggcgtgctcctatagtcccagctgcttgggatgctgaagcagaaggattgcttgagcccagaggttcaggtgagctgtgctcacaccactgcattccagcctggatgacagagtgagaccctgtcttttaaaaaacaaccaaaaaacgccaaaaaactaaatttaagattctttaccatttggccggccccactgctcttcccttgcctgtcccctcacaccccaccaaaatcctctaaaatccctgccagtatgatcttcctaaatgagtttagtcttataatttccctgtttagaatccttgtaagggtaaagtttaaacccctctgcttagcccctgcctccagcctctgccaggagtaatgtgctcccatagtactctgatccacttgtatttggtgcttccttttttttttcttttccttccttcctcctttcctttcccttcctcttcctcttcctccattcttccctccctccgtcttcctccattcttccctccctccctattcctccattcttccctccctccctccctctcacatcctttaggactcagcatcacctcctctaggcagtctttcctgactaccaccacttatgcacaaaacacctaagcactaccttatgtggcctcatttattcactgcttaaatattttttatacacgtgctgtgatgtggcacatgcaggtgtcattcttgatgatccactggttattgccttgaggggatgacaactgcccggtagggttacctggtgtgactgcacctaaaacagcaataccaaagggcccattgccagttctgtcactgaccagctggggcctctgagtatatcccttaaccactttggaccttaatttggcatctgtcaaatgagatggtggaacttgaggaactctaaggcccctactgtgcaggtcttattaatgattacaacagcagcagcagccagtgtttactgaggacttacaaagcaccaagcactttgccaggcactttgtctatcctaatccttacatcaactctacgaagttagtatggttactatccctattttacagatgaggagactaaggctaagagaggttatatgacttgaccacaaggtcataataaagaaacagatttgaatccaggcattctgactttactgttcttagccacataaatgggcacacattcgacacacagttttgtgtactgtttggtggtcactcacagactccatcccagacctctgcatgaaccatccctgttctacagttttaaaggctcaaactggagtctgggtgaaacctggggacagaagactgctatagtcacaattattagagggaaatgggtgaggaccagtggccagctctgttcatgaacctttgacaattctcacagagagtcttgctttggacagagacaacttacgttgctgttttcagttaccctctttaggaggggagagtaggcctgagtcatgcttcagacacagattaaaatcagatttggtaccaggtgcagtggttcacgcctgtaatcccagcactttgggaggctgagatggcggatcacttgaggtcaggagtttgagaccagcctggccaacatggtgaaaccccatctctactaaaaatacaaaaattagctgggtgtggtggcgggcacctgtaattccagctgcttgggaggctgaggcaggagaatcacttcaacccgggaggtggaggttgcagtgagccaagattgtgccattgcactctagcctgggcaacagagcaagactgtgtctcaaaaaaaaaacaaaatcagatctgggtagtatccctggcagagtcccaggggcatcctttattagggttatagatggcagactccctaatctatgcatataaagccttattaatggagaagggggtgtgtgtgtgtaacttaaaaaaaagaagtgtaatattatatggaatacctgttgtaaactaaaataactggcaaatgaaattaaataagttaactgaaatataataggcccacaccataatgtattgtaatgtatcgtcaacccatttacctccctaaaggcttatagaaaagaatctttaaagtcttgagctctgatacacacactctttctcactctctctctgtctctctactggttcctatttttctgaagtctttgtctgaactagagtgggtgggtggtagggctagttagcaattgcagcccattctccatgcctccccccgtctcatctttttcagggacagccaacataatgtggtcacaggtgtgttgggtgagccttgattaatgagattcacggctgtcgagtcaggtcctccggctcatcagcctttggcagtttagcaagcaggctggggccctcagctcccactgctgcattccttctctaggcggtgtattctctctttacgacacgtgttctctctctttttttccttttggttagttgaacttgttctgagtccaagtggcaaaggcaaagcctgacttgggtgtagcagctctgtgtcaatagccgtctctctgctggagcctccaggcaggcggtggggcagagctgggcagtttctgaaagccctgctgtgcctgactgccatccaggtgagacagagctcacctcctggcttctgcacgctgcaggccttgtttccccagggaggagttgaaaagccacttctgtgcttgcctctcctggcagcagggattcgaatagttgctagaattctctcaactttgtgtgtgattatggcttccttaccaaagtggctgcttttaactaacttatggctgaagttttcactttatgtccttgtttgtttgttacaggtgaatcagctcccggccgactttaggattcttctggattttaaattttttctttttaaaaaaacttggacggataaaagatgtgccatggcaggatagcaccaaagagcacctcagtgtttgccgtggcctccgtgggacatggagtgttccttccgctagtgatcctttgcaccctgcttggagacggacttgcttccggtaagtcctgacctgccttctgtgtgtgggtgggaaaatatttaataccattgtttctctcgaagactaggacaggggactctcctcctggcaggcggtttcagggagagcagagggtggagggcttttgtggtaaatatagcagggagccagtccttctgaggtctaatgagtcacctggaggaggggcgtgtgggagcctgctggtggtaaccttgtcacccctctcccccagccataatcatcatcaggaggacagaggtgtaaggttcagagcacaatatgcaggttaaggggacagactttggaatcagactgcctgtgttcagtgcccattctcactacttgcctgccctgtgactctgaacaagttattttactgctgcaaggctctgtttcctcagctgcagaatgggataataataatacctacctcactgggtggttgtgaagattgaggtaataaaataagtatgtaatgattgttagctgtcttttgtttgttcgtctttctgcgctttttctcagaatgagtgggtagttgaagtattgtaatttagtgaaaataagacccggtcactgacactacaaatgttgtgatcttgggcaagcgacttaaccattctagggctcagtttttccctccatcagatgaatgggtttacctggaataacatttaaagtcacttctttgcccctcagtaaatgctttgatgattctaaggactttgtggttgaagatggtgagctggacgggccctagcaggggctagacatgccccattgagcctttttgtttgtttgtttgtttgtttgtttgttttcagagagtctcaccctgttgtccaggctggagtgcagtggcacgatcgtggctcactgcaacctctgcctcccgggttccagcgattctcctgcttcagcctcccgagtagctgggactacaggctcatgccaccacacctagctaatttttttattatttagttgagacggggtttcaccatgttggccaggctggtcttgaattcctgacctcaggtgatccacccaccttggcctcccaaaatgttgggattacaggcgtcagccacgtgctcggcccattgaacctttttgagtttgtacagcccttgttgccttcaacagtgctccagagacccttctaggcagtctttgtgtgatcttctagacaaaatgtccttaaaggacatgtttgggtgtgtacggtaggcctctgggtggtgtgccacaacctacctctgtgtctacactccagaatcatcattgaactcaccaatactggtgttcctactggactttgttagaaacacatacatggcagtttccttgtccagtgcttcctggagagggatctcagaactagatcctggaaggggactttggtggggacagtaggggagtggtatattgtggctgtagagcctccatagtttagtgctacttctttcattctctatcagctcccaccacccacttatccaacataaacagataatggcacagtctcagctaatcttttttttcttttcttttctgaattgttggaagaaacaattacagatttttttgttcattgtagccttctccactaccaacatatagatgtgcctttccttccaccctattctgacacttaacccaagccttttccccctaggcatgaggagcccctggcacagcccagggggccatgatgattgggaccccacaatgtggccatcatggttatatgaggtttcaaaggaagagaagaccaggctataccaatgtgcaacaaaatgaagcagagcctcctttcatagggtcaccccaaaaccagaggaggcctctagaagtgctagttgcagaaccacagagtgtggttgactctcttattcaccactgtgtctttagagcagaagttggcaaactggcccacaggccaaatcctacctgccatctgcttttgtagaaccttccagttaactgtttatatttttaaatggttggaaaaatcagaaagatatttcatgacatgtaaaaatgtatatgaaacttaaatttcaatgtctataaagttttattggaacacagcagtgctcattcatgtatatattgtctatggctgcttttgtgctgcagtggcagagttgagtcgttatgacaaagaccatgtggcctgaaaagcctaaaatgttgaggctttaaaatatttgggtctttgtaaaagaggttcttccccagcccagaacaaatggtgctcaataagtatgcatgtgaatggaatgactgtcagagcaggaaggaaggaaggcctagtcaaaaccagcttgggcttcagagaactgtgcacttgctgcccagaatctcacagctaatggtagggccaggacctagcctggtgcctggcataccactgtgacctgcctcttccaaggctcctctaaggaaactgccctggcgtgtggtgttagtggcataatgtctgccttaagcctctctagtgtcattaagctatcctatttacccctaacctcccttttgttggcttcatccctcccattccccacctcattttccaactacccacaccttcccagcttcccactcaagatccgaaatccattatcaggttccatactggctggataaagggattattattttccactgtggaaaaatgtgtctgtttatagtgtgggctcagaccaggatgggaaagttggctctgttgttttctttcccctcccccacctgaaagaatgctccttccctgccaccccaacctccaagtcttttctactccccataaaacatgtgtactggcaggggaaaggggttcacctttgcttagatcctgtgtactaagttgctaccaatgtttttccctttctttggagtagcttctaggggagtaggtgccctttctaggcctgaaacccaaagcacacctgtatggccgtgcctggcataagcagcatgccaagcaggcttgtccagaaaccaggatctcagatactctgaagccgaggaaaggcagtttaattcaggaaaagcctcttttcctcttcttgtgtttcttttttctttttatttgttttagagatgaggtcttactctgttgccaggctggagtgcagtggtacaatcatagctcactgcagccttgacctcccaggctgaagcagtcctcccatctcagcctcctgagtagctgggaccataggcatgcaccaccatgcccagttaattaaaaaaaaattttttatgttgcccaggctgatctcgaactcctgggctgaagtgatcctctcccctctaccttccaaagtgctgggattataggtgtgaaccactgcgcctggcctccttcttgcatttcttacctgttcttatagctgctcctgaacacccacttcagagacatttttaagtgggtgcttgtaaaatatacagccttgctatccagtgggctgtagtagaccctggctatatgcgtgtgtacaggcacattcatgactctgagaataccactagacataggtaactgggcatcctctggagacaatttgtctgcatcgtctctggtcgtagataccacagtcatcataatctgtatcatctcatcatcaaatatcacagttttgatcacagtctaaggtaggaagaatcaggtacttgagagttctggagtaaaattacatcatgtttaaagttcagtttccatactggtttctctcatctacagctcgagatttgcagttatagcagaaaaggtgttagagaggcattgggtccagctttcctttggtcattcctttaaatggggagaattattgataagtttcctttttaagagtggcaaaaggaggcgtatcttattcttcacacctagtcacaccatgcagtggatagaccagaattaaaaataaaatctatgcacatgctatccaatttgcctttcttggactaggcggaattaagatcttttctctgtagcagcctttctcaggtctccaagtctttcattttacctgtagtcttaagaaacttgctgtatgacctgaggcaaatcacatgacctctttgtgtcttttgcaaaacagaaacaataatccttaagaatgttaagttggtgttgtgtagactaataaaaatgattggaaggcaggcacttggcatataaaatgaagtgtgtgatgtaattcccaaataacaacaacagaattggtatgtgacctactgttgagttacaaggtgcagtagactttttatgcagttgatattctttgctgtcattgaaacacaaaacttaaggtgcaaagtactgtttgagttggggataagagatttttggagcagttatcaaatttgaccagtaaggagggattaatttacttcaggaatccccattgctttccagaaagctcatgtttgcatagtttgatcttaatccaactggcttgctgactcataaaaagtttttgtttgcattctctttctttcctgagcttatttactaaacaaactcagtattttacttgtttctgatttttttccccttaaaatgttgccatgacatgttaggccgtgttaaacatcacacaatcacctaaaacaattttagaatagcagggaaaacagccatctgcatttctacatgacagaaagccaggcagttagttttcattgaaaatggaaagtgttgagaactaggttctctgggagatgacttggctttagcctgtagcagagagatgttggcaggtggccctggctcacctcatcttggaaggaccctcgagtcagagagaatgtacactgagttgagaggagaaaacaaatgggaaactaatgtgtatagagcatcacttatgtgtcaggctctgttatcgttccatataaagctctcagaacaccccagctaggcagttgtgcaaccattttataaaggagaaactgaaccagagacaggttcaataacttgttcagaaactgatgattttaagtggtgaggctggctgggatttgtgctcagtatgtctgactcttgcctatggtcttttctgggagccacgctacctgtgctgagtgacaggcttcactgagacctgttttttgtatttcctgtttgaagtgctcagatcagcctccagaaaattattctgatggaggaagaaagagatgatgttttctcctgatggataaaaaggatacaagagtcatctctgggtcaccatgtttcccactatggttgtttctttttttttttttttatttgagatggaatctcactgtgttgcccaggctggagtacagtggcgcgatctcggctcactgcaagctccaccttccaggttcacgccattcttctgcctcagtctcccgagtagctggtaccacaggcgcccgccaccacgcccagctaatgtttttgtattttttggtggagatggggtttcacagtgttagccaggatggtctcgatctcctgacctcatgatccttccacctcggcctcccagagtgctgggattacaggcatgagccactgcgcctggccctctgtggttgtttctgttctcatctacagtggctcttggttgtttggttccagtttaggcacaaggtttgccatggtggttctattcttggaaaggaacaatagggacgtagtaaatagtttgctaaatgaggatatagttcccaaaacatccgcaaagcatcttcctgtcagctgcaaaccctgttgatgaaagtgatgtaatctctccatggtgtaattacctgtgactataaaaaaaacttagagattatggtaggaggctggatgggtcattatagttctcgatgaaccctagtgtcatgaaaaggcattgagaaattaccctctgcacactaattgttgtgccatgtttaaaacattgacaacacatggtaccaccctcgcactgtaactttctaataaaagaaacccagagtccacgtaactgggtccctattgggttaaagtcctcattaaacacagattccatctgctgagcaatggtgccccactaccctgctaacttgccagcttagaggttattcttcttacctacccgactttctgcaaaagagaggcacaggatgctaataaaacaaaaattagggttaacactcagtcttcaatgattctaggtaggtttccagatgaacacctctcaccacttcttacccactggaagagtgcagtgcatcacttgggagtgggagcctgcagagggtgtgaggagcccttccaggtggcctgtgctggtgtgcctggctgcctggactgggatcagatcaggagagaccttggcctgcctcagatttagctttggggcccagagggacagaaacatttagagataacgtttccatggtgcaatgtgaatgaggagttccctggctgctgacttctttccagccctgttcatcgacctcatcttcagctaatttaacacatgaaaatccgaattcactgaaagatgagggtgtgactataactttttttttctgagacagggtttcactcagttgcccaggttggagtgcagtggctctgtcacagctcaccgcaacttctgcctcctgggttaaagtgatcctcccgcctcaccaccttagcctcctgagtagctgggactataggcatgcatcaccacacctggctagttttttaaaaatatttttgtagagatgggttttgctgggtttgcccaggctggtcttgaactcctgggctcaaacgatccacccgccttggcctcccaaagtgctgggattacaggcattagccactgcacctgactgactataactttttaagaacaggattgtccctaggatttcttcacatagctgtctcttatgaggtggagtgggattcaattcatgtacacctcaaaatagtaaataccacctgcagctctcatggagccactgagatcatgagtataactgagtattatatctaggtaccattatgcttcaactcttcaccttgttttttggaatgactgcatagtctgatgaaaagcatgtactctggagtcagattgtctgggttgaatactgcttgcattccttgctgcttgtgttgccttggataatttttgtgacttcactgtctgtatttcaccagaatggggatgataatgtctgctttataagattgtagtgaggatcaaataagatagtatatgtaaggcatttggaacattgctcggtacacaaataaatattcccatattggaagatcagatcctagcaccaattgatatcattccacacttctggttttatgacaccacagctgcttggttcagacagactcaggttggaacgtgctccctgtttcttccatatctcttggattctgtttgaatcaattcagtgcatactgagtagagttagatccttgatattcgtgaggttttctgagtccctaaattctcaaataacacatgttggtttcccatacatgaagacgagtagcaaagagtggtaaatgcccttctgagatgttggtgctggagtgagatcagctaagtgatctcactgtgaactatttgttctcttcagggaggctaccctgttggtatttcagagctgatattcctcagggatgctatttgttaggaacatttggagtcagttttgaaactttacatattaaatatgagaatgccaaggatctgttcttttaaagacattttttatttcgtcagcacagtgatgtgattggaaggttgcattttacatgattccaaaacacaactgggagaatataacattagaattaaaaaataagaaatatctttttcccatttggtagtccttttgcttcctcttgcttttcgtagctatattggtatttcttcttttaggagcccctttctacctagatttattggcatccctggtgatggagatttttttcttgtttaacttctttgacttattagctttgccagtaaccagatcttttaaaggagaattgtttagtcatccaaaattctgggaagtagtgcagggaaggtaaacagattgtcttcaagatttcttggccaagttttttttttcattctttttaaatcacaaaagtatttttggtatttcagtggggagggggcacaaaatgtgtttcaggaagttatgaccaagtaaaaacagggctataaaataattctgcttcatcctttgttattctgagtaacaagtgacactctatgaaatacaaagggcttgatcaattcttcccatgtagtagacacatgtctccttgggagagggcgggacctttgtgtttattgtcactggcttggcttctgatgattcggccttgttgaccctggctatggtaagaggcaccagagaatgtcattgggattgttgcacactagactatgactgagtgggtatgaggatcagcctgtcagtgtttcctgagcactggtctaggcacagaggggtttggtggcagataggagaaaagtcttggatttctctttttccctgttgatctcattatgatccagaggctggattgcaaatgacccagtggagtcttcagccagtgcagccccactaagcctccttgataactgtgcatggttgctcacagtttcttttttttttttttttttttgagacggagtctcgctctgtcgcccaggctggagtgcagtggtgcaatctcggctcactgcaagctccgcctcctgggttcacgccattctcctgtctcagcctcccgagtagctgggactacagacacccgccgccacacccagctaatttttttttttttgtatttttagtagagacggggtttcaccgtgttagccaggatggtctccatctcctgaccttgtgatccgcccgcctcagcctcccaaagtgctgggactacaggtgtgagccactgtgcctggcggttgctcagtttctgattagcggcccatgaagttagctggagcccttcagtaggctgtgtggctctctgttttatacctctcacacacctctctgagctttgatatctgtacacactgctttcggttttatttctttggttttgctctttgtttttgattcttgttctttgttcttgattccatatgtgtttgcatataagctcgttgaacacagagacaaaatcctttttatgttgctcctttgctacagccaggccagtgatcatcccagtagatccaacacacgcattgtgggaaaggtactccataggtgggtttaccccataggatgatccagaatcatggcttgtcctctgtgtgaggaaagcaggagcaagtccagggcccagtgagcagtagcagtgtgtgggggcttcccactgagtgatggttcctcatagtattctgtccccagccttctggggaggaagtggaggagcacgtgaaagtgttttcatgcctcagggatgcaggtggtggggctcttctgtggagaaaagagagggcccaggcaacctgcctagaagagtatgttgcagagtatgctacctttagcttgggtgaggatttcgaacccagtgtggatcctgttaggtgatgaagagttatatagtttgaaagtatatccccagctgggtgcagtggctcatgcctgtaatcccagcactttgggaggctgaggcgggtatatcatttgaggtcaggagtttgagaccagcccggccaacatggtgaaaccctgtctccactaaaaacacaaaaatcagccgggcgtggtgatgcacacctgtaatcccagctacttgggaggctgaggcaggaaaatcgcttgaacctgggaggtggaggttgcagtgagccaagattgcatcactgcactccagcctgggcaataagagcaagaattcgtctcaaaaaaaaaaaaaagaaaaggaaaagaaagaaagtatacccctaccaaatctcatgttaaattataattgccagtgttgaagttggggcttggtgggaggtgtttggatcatgggagcagattcctcatgaatggcttgggcgatccccttgatggtgagctctctgagttcacatgagatctggtggtttaaaaatatgtagcaccccctccccacctccactttctccctttcgttctcattctcaccatgtgatgtgcctgttccctctttgccttccaccatgattgaaagcttcttgaggcctccccagaagcacatgccactatgcttcctgtacagcttgcagaaccgtgagccagttaaaaaaaaaaatctcttttttaatgaattacccagtctcaagtattttttttcttttcttttctttttttttttttttttttgagacagagtctcgctttgtcgccaggctggagtgcagtggcgcgatctcggctcactgcaacctccacctcccaggttcaaacgattctcctgccgcagcctcccaagtagctgggattacaggcatgtgccaccatgcctggctaatttttgtatttttaatagagacggagtttcaccatgttggccaggatggtctcgatctcttgacctcgtgatccacctgcctcggcctcccaaagtgctgggattacaggcctgagccagtgctcctggcctcaagtatttctttatagcagagtaagaattgcctagttcaaggagggaggaaaggtacgctttcattaccagtgggaagtgaaggaggaatgtatatggaaatcatgctggctgtaaacatatcctgacattagagaggggcatgagagtgccacttgggtggggtttggcttcactttcttgcctactgcctttgcagccacagcttcctctacctctacgtctgtttctaaagatcaaggctaagggacaactccttctcccctaaacatcttcaagcttattctcacctggttcttcctgtggctagaattctacctcctgccttttcctcccatacttctctttatccttcaaagtccaacttagcttcttctgtggaacatcacccatctctcttaccactagaattaatagggtctgaaggaaggagagtgggctttgtgtgtgtttattgaatggaattaacaagagctcctagtcgtagttctttctcttgggaggatgtcagacaggttttcctaggagcaggattccaactcttagaatcttgactgactttgatttgaaaggattggccagctttttatgacctctggtaattgcagctttggggaacttgaaccttttgttctgtacatcatggtacatgaacgctatagaccttgctccaaaccctaatgaccctgggttttggtagggttgctgtggggcagattgggttttgtattttcatgagtgttaactccttaagcaagtatgtgttgacataaggtgggcaggagctatgtaatgccacagagggctttctggggatgaggtactaggctggatcttgacagaagttaatcatatgtagtaagcctgtgagaggagggcagcagcagccaggaactgtgctctgcactggaggaatgcagagttatggtttagcactctgatttattccacaggtactcgttgaattcctgctgaatgccaagactgtgccagctactgaaaatagaacaattccatgtgatacatgctataatcaggaaagtactgcactacacaggaatactcattagggggtctcctgactcagcttgaattggtcatggaaggcttttctgagggagagaagtctacactgagatctaaaggcaagtgagttaacgagtatggggagacaaggtggcatagtcaggtgaagaaggcagtgccttgggccagacacgctggtttgaatcctagttctgccagtagtgtgtaattttaagcaagtttctcgaactctacgtccctcagttcttcatatctgtaaaattgggatgataacgtacataccatatagggttgtggtgaagatgaaatgttgctgttatcatcatcgttgttaaaatgtggcacttgccagtggcaggtacagcccgctgttgcggggagtctggagggaggagaggaagagagtatggtgtctgctctgctcatctcagcacttcctttcctgggaacttcccatgtcactgttgaaactttggatgtccaatatactgtattccctaaactaatttgtttcttgccctgtgaatgaagaagtgttctctttcactctggtggagtatgttcagtagctgtagtttcaaaaaagaaaaataaagtctaaccttagcctaagaattcagggatttaggttgagcacaccaaaagcacagtttgaggaagcacccagataggactgagatgctgctagtggaggcaggtgcctgtcctggctgaattgtcagaattgtggaggaggaggaggaagaagagaaacaagctctcttggagtatcctaaggatcaaagagttaaagaaaaaacaaactctagctaatgaatcaagaagttgaatgagtctaaacaggaaaggaaagagggttggaaggaggatgttaattttaggtacaatttgtgggagaggattggggatgagaagaatagcagtgggcacctatttgcctatgggacaggaagtgatgggctaggtgaggctgcccttctggtccgagggaagaggtcactcaggacaggccacaggagtgcatgcttcttgactctcatcacctggcctcagttcagccaactcgtaggaggcatgtctgacaaagactccttatttcagcaagtctgatgtaccgcgtggggtcccatgtgggtcttatctggcgtcacaaattccatggggaggctggagggtgtcagaggttcttaattgcttggggaagggagaagagtggaggagcagctggcgtctgggcccttcagatgtattccaggatttgtcctcttggatcaggctggggtaattggagaagttggggtgaggactgtctgtgatttgatgtgttcaggggtgcagagaactattgtgacttccagcagagatgtgtctcaggtttctttgagtggctttcagcaaaggaaccctttcttggtgctattgttctcaataccttgttgttaggcagtttagaggctttgctgttcaactggctcctctctctggcattcagaaaatctgtcaccagtaacgcagaccctggccttggaggaatagttaagattgtgaataataggattaagtgagataatatatgtaaaagtcccgggtaaacaataaaagtctatttcaatggaatggattattataatactattttttcagtcagcatctcttttctgaattgctcagagcacttcgttaacactaactggttaatccaccatccatccctggttggaggctggcatttaatagcccccctttgtatgcaagatcaaacacaagtttccaacaaacccccacatcttgagcttgaagcccaaacctacggaatcgaaatctaaagcttggacttctaaatgtgataatgcctcattcctgggaataaagaaggtgagaagagagaggagggatcattaaaattttttttttcatgaataattggtcatgtcagacaaggctgtcatagtcaggattttgaatgacctagaagtcagtcagtcattttcctctgagaagccagagttcctgctggaaatgaaacttgataggagctggagaagcagaaggctaagaagagcagctttggggcaaagaacagggaagcagagagggggctggcagatttcttcattctgtcctattaggctgtggtggaagtacttgagatgccaggttctgcatcacagtgctaactgcctggcacatggcagtgggaacacactctcccctctgatgtgtaccaggaagtgtcagggggacccacagcaggtgcttggtgtattcttcaggtctcatgttgaaacttcacagagcacccccgagtgtcctgctcaggccagttttgctgcagaccaagtattgcagtccagtttggcagggtgggatctgagcagatcagccttaggccgactctccagtcaaggaaaggcctaggtgcattggtccacctgtgtcccttccgaaggctggtctcaccagcctagagctggcatgaaaaggtcctgttttgttcacagtactaggtgaggccattcagagtcatcaggacctttttccaagcttgtacttccctgcctctggtcaaggcttaaagggcagttccgtcctcaccttttgtactctcttgcacagagtcttgaaccctggaagcaggaggaggatatactgagttgggaagttcctccttcctccagtggcagatgtgtgggctcccaggtttgaaactctagaggtcattcaggtgtgccagtgaagaggcacatactcatgagagaaccaacaggctggaccttggaggttatttgcactagtgagtttcaaatttgagctagcatcagattcctctagagggcttgttaaacacagattgctgggtcccatccccagagtttctggttcagtaggtctaggatgtggtttaaaaatgtgcatgtctaccaagttccctaaagaagaacttggtagacatgaagcagcagctgctgctggtctgaagaccaaactttgagaaccaccaatttatacttgggctgaaaaaaacctgtctgactcttttcagagcaaattttgctgaggtgaggacagagtgggtggagaaatcttgaacccactagggagacaagtggccctctcagaaataggctactgcaggtgggccaacctaataaaactgagaagaggttaagggaggatgctggcagatgtatctcttctccatgctggtctggtccttgcatactaccctacagcaaggagccagacctggtgagccccggggctggatcattttcatttcctattctgccccctgaggcagcagtgagttctaaaagtctgcattttcggatgcctttcctcagtctgggctctgtggtatgaagaacgggaccctgagccggggtcctgggcatcggccctagcactgcctctaatggacagtaactgaaggcacctcatgttactcaagggtaatgtgagtgtggactagctctctggtgccttttgtgctctgatattctgggttctttaatgatttaccctgacagcttcctcctcagggtcaggaacttctgctggcttgttacttgttttttattttttccgtgtatgagaacttctgttgatcagaatcccatccagagactggctcgccaaaagtgaaactagagacaagtttgggaattggagagaataacttttctttttggagtcattggcacctgcagttgtgctgctgccataacacctgcctacagagagaatgactgcatcactgtcgtgcctgcctatcttaccccactgccagcttcacaggctgtctgatcagctctggtttccagggtgctcaggattgttattcgacattccccactgcctggcacagtgtgtggctcatggtaggcctgtgtgcatgcttactggatggatggaataagcggttgtatccagctacctcttcttttctcgcttcttcttaacttggtacagttgtcttcctttgccctcctcgcttccatccttccttccctgcttcctttgtactcatttttactcctcagcactctggcagagctagcatgtacgtcgagtgctttgggggttaaaagtatacacaagacaatcataaaacaccctatgcaagccatctatgtgaggggttcctccagagctccccactcttcctccttgtctcttctgcccactttgtctagggtagctgggaatgttttcactgtcctaggggaatttgctgttcttcagattgaatttgaccccgttttcagcctttatttcccaccagagcctgatggtgtttgtattggcaagccagaagactcctggcttggagagaattagagttagtacagcctgcctggccctgtcttttcagcctctatctgaaggggcaaaacaaatttttcggccttggttaattgttacttagcccctctgatccagcctgggcaactttcaggtagctcaggcactgactagcctgaagtctctgttgaaacagggaagattaaagttgatttgattcatttgaagtaaaatcagcaggcttttgatgatttcattaatttcctcccttctgaacaccctcctgttagcagtaattggaaaccctgactctgtttctcatttcccccccacccctctgctttaatctgagacaactggaaactgcactcagctttttcatttactggaagaatggtttgaagatggttttaatgactggctttgacactgtttccagaagctgagactgttgccgtgcttaagttcacacctacctgggggcctcagttttgctcaccttgcttctataaaactgcttagttcttggtgtgcaggtggaagagggtccccatgagaattctctttttatcccaggcaatatatatgcaagcttttcattactcattttcatcactcaacatttacagactgcctggggtgtgtgccaggcactgtcctagtaactgagtgtgttcccagcacctcctcctggccctggtggacgtccagaggactaggtaggtgagattccagcaggatggtggctaaactcaaaccttgggaactgtagtctctggggctttctttctctatctgtttttatagttgcaacttcagtttctgtgcttttttttttcttgggcctgaagaggaataaataatatgaaccaccacttgatgtcagagaaatagcaggtagcaatagctgcaacagctaatcactattggcagttgacaagatgtacaaacacttgcttgtatatcatgtcatattgttgtcctcacggtaaaccatcacagccagtaaaggacaaagccagaattcaacctaggccttcccattacaaatcaaatactttttgtttattattgttattatttttagagatgaggtttcactgtgttgtccaggctggtctagaactcctggcctgaagctgttctcccacctgagtggctgggattacaggtgggagtcaccatgcctggctctgctttttgtactatgttgttttgtttgatggtttggttttgtttttaacgctgacttcccatgctattgtctttagtatgacttcaaccacttaagtgttaagaacctattatgtatgcattgggtcttgtacaaggaagtcagggtctcacaatctaatggggggaaaagataagacaattcatcttagttgcccttgagtgattcaggtactgaatgctattagaaagaagagaattaaccctgatgtctgtctagggaggcttccccagaagagccaagacttgaattgggcatggtggaaaggcaatactcaaaccaagagagaggtgaggaggagttttggttcctatatgactacctcagactcggggatacaaagaaggtggtaaggtttgtttccttcttcagacttagaaaaccagtatcctctggggtgatgctcctccaactttactgtgctttttctttttttttttttcctttttgagacagggtcttgctctgtttcccagattggagtgtggtgggtaatcacggctcattgcagcctccacctcctgggctaaagcagtcttcccacctcagccttctgagtagctgggactacaggtgcatgccaccatgcctggctaatgtttttattttttaaaaaaattgtttttttagagatgacatcttagtatgttgcccaggtgggtcttgaactcttaggctcaagcagtcctcatgccttggcctcccagagtgctgggattataggcatgagccaccgcccacagcctttactgtgctttttaaaatgagattcccacatattttgcccacaaagaaccatttagtagatctctgtacagcccagcaatctgcattctttaaaagtttgctaataatgtagaacagttccccagcctctcaaggtctcctgcctgaagagaagaaccgaaaggtatagatttcatttgttcctttccagaggcagaaactgtttggtcagtcagctgctcccgttattatggtgaaggtggtgaggtggcccaggctttgagaaacaccataacccaaggtgttctcatgcccttagtgttgcagaaagcattaggaaccagggacctgggttttgatatcatagaggtcttacttgatgagaagaggactaagagtgtttaggatgaaaccaaggaggaatggggacagtggataataaattgtgtaagttaagttgactctgacagcacctgggtcagtctgtctgccagcttgatttgaaggcaggtggggaaacccactgagtctgagtacctttgaaacaaagttctggccttgctcagagttactcatgttactctgttacgccgggcgcggtggcttacgcctgtaatcccagcactttgggaggccgaggcgggtggatcacaaggtcaggagatcgagactatcctggctaacacggtgaaaccccgtctctactaaaaatacaaaaaaaattagctgggcgtggtggtggacgcctgtagtcccagctacttgggaggctgaggcaggagaatggcatgaacctgggaggcggagcttccagtgagccaagatcacgccaccgcgctccagcctgggccacagagtgagactccgtctcaaaaaaaaaaaaaaagaaaagtgtttttacagacctgtttggtagcttagctttcagatgactgttttgcagaggggagtgggtggggtgggtggcagcagtggagacagctgcatggtcaatcagggggtgagtagaaacagatctgccagaggatttagcagtcttgatgaatctaattatttatttctatattttgtgaccatatggtacctagggtggttataaagattagaaaacaatcaccaagttaccaaataccctgttaagaagtgatatgccttaggttggaggcattgtaaaaatactataggcgaaaagaattaacacttataaacatgtaatgtgttccactgtaaacttaaaaaatggagacgagtgtaatcacacatggatacttgcctcccagatttaatattttgccatacttgcttcagaccttttcctccagagatgaccagtatcctaagttgatgtgcatcattccaaccatttctgtttttggatacttaaacctgtattcctaagaaatacagaatattgttttatgtgtttaaaaatgtgcagtgcatttggtgttcctgcttcaacagtgtttggatggaacagatccagggactctcttgggaaaaaaaaaaagtatgtaaccttccgtagcatacttttttcactcaagatttcttttgacatttggctatgttagtacatttcttttacctgcagtatagcattccattgtgttaatataagtgtatattacatattgtaacataatttataattatatataattatataaatatatatttataattattgattacaaactatagttgtaaattatatgttgcaattatttgcagtgatgatatgtaacagtataattgtattaataacaaaatatttataaccattctctcactgatggatctatgggcgactccagttgttcactgttaaaaacaatgctgcggctgggcatgatggctcacacctgtaatcccagcactttgagaggccgaggtgggcagatcgcttgagcccaggagtttgagaccagcctggccaacatgatgaaaccctgtctctacaaaaaatacaaaaattagccaggtgtggtggcacatacctttaatcccagctcttcgggagggtgaggtgagagggtcacttgagtcccggaggccaaggttgcagtgagccataaatgtgccactgcactccagcctgggcaacagagcaagaccctatctcagaaaaagaaaaatagttaacaaaagaaaagaagttgttaaaaaaacaatgctgcaaggaacatccttgtgcatgtgtcctaagcatgtgtgcagaatttctctggtatctacacctggcaggagagttccggattgttggaaatgcacttcaactttctgcatattcttcacagtaattgtaccagtttacactactactgatgtataagaagattcttatatctccatatgctttacaacaactggtattgttaggtgttaatttttgccagtttgatggacatgaaatggaatctccttaaggctttaattttgtatttccttgattatcctctcccaatttgtagattttttgaacttttcttacggcagtggttttcaaggacctttgagatccttttaggggattgacagggttgaaattattttcatattaagatgctatattacatactaagatcctgtttgccttttttgcactcattgtttcatgagtgaatagttgagtttacagaagctatatggcatgtgttgtgatcattgatgttaacatctgtgggtttattgttattttaaaatgaattataaatatgtaaaatttttagttctattttcaaatatggtaatattgataggtgtaacacacaaattctttgggcatcctcaataatttttaatagtgtaaagcaagcttgttcaacccacggcccatgggctgcatgtggcctaacacaaattcataaactttcttaaaatattatgagtttattttgcttttttttttttttaaagctcatcagctattgttagtgttagtgtattttatgtgtggcccaaaacaattcttctttcaatgtggcccagggaagccgaaagattggacacccctggtgtaaaggaacctgagagcaaagagtttgagaaccactattattttactatgtcaatttttaaaatatttttttcctgtctggtaggtttcttgtttaagaaattatttcctatccaaatttcataaagatgggcttttatattttctcgtagaagttttggaaagtatttttatgggtggcgtctgccaattcccaggcccttcaaccactaggaatagtttttaattttatgccttctcagaaacacttatatggcctgaatggaacatcttccctatctgaatataattttttggaagggcagtatgtgggaatagggatttagccaccttcttcagatcccttttgttcaagagagcctcctagcattttgcagagttcagcagtctctccttaagaatggtgtacactctcattttggatccttgggttcactggttttgcagttggctgttcagaggcccagaacccaccagtgacagggattctggaagcaaaatccctctctgcagcccctaacccacatgccccagtttccactggatacttgagtttctgtcaaggcatcagtgcccttattcctggttgtgtttgtgctggagtgggaaggtgtgtaggcagctgactggttaactgcagtcaaggatataaacaatggcctcctctaaggaaaaaaattacattgctgacatccaaggccccatcatctctcaccaggctcttactggtttccgtgtctccagtgtctttctcacccttcttcccacaaatctgtcttccaccctgccagaataactctcagaatctcatacttggcatgatgctacttctcctcttaaaacaaaagaaaacaaactcagggtcccataagacttatggtaaggtccattcttcttagcaatataaccctcatctgtactttcagctttcttgccagctgcttctgtatcctatcctctgtcctggaatctcaccaggcatctcatttttatttattttcctagtatactgtggtatgtgcccccaaagccttgcttatgctgttccctccaactcaaatgttgttccccctttgtctgctgggggagatcttttttgtctctcagaccctacaaaactcaacaagtatgaattctatgaggatgattcctttagtcttcccactgatagcctttccagtcaaaacgaagactcagcaaagttatcttggtctttgttgcacttgtagctttgtttggggaaggctgatacatctccatcccttccccaaaagtttcctacccataaattttatttacagtgttggccccagttgttttgcagcctagttcttcagtagttgcacaaaaggaagatgccttttttgtggttaagagctgatgttgatatccttataaattgtcttcctacatgcctttccttcagggagggaatgcactgaacagtctgatggcaacaactagtccctcacccttcgctaccaccaattattgtgcattttgaaaaagtagtacattgacatctgtcatattttaaaaatggtacatgaaatacgtgtatgcattaatgctgtctgcagaaaggtcctgctcagggaaaaaattctggatggtgctgtttttcccatttagccacacctagcctcctgcctcccctttagcagcctaaaaaaataaaactttataaaccctggacatctgttagacatgcaaattaagcagattaacttattttctgaaagagctttatagcagaaatccacatggatgtggagaaaagggggctcctgcttggaagactgctgacgtaagtggcctgcagtaggagggttgtggtgggccagagaaggggacggccccgtagggggatctgaagtgggagactttgattgcaggaatcttcatgtcattgttaacatctgaaagagttgactttctttggcaacttatttatagccttttcattacttcttgagaatggtcgctataaagatgggaaaagtaagatagtaaaatgggggaaaaattatttccttggctcacattgcagtgatcatggcaaaggtaggattggatctgttgcatgctgccttttagtctgttgcaaacaggctaggtgggtatgaattctcaagttcatgaaaagggcttacggctaaagaagtggggtctgagcactcacaaattctgggttactgtgttaaatactgtgttaaatgttgaaaaatatgttttcatatggacatgcatcagagagaagtttcttttgtgggtaatgcttgtcttgttacttgaagagtactgctaatgttgctgtaatgtttgattagtagtagtttgagaaatgaaatataggcctggtggggtggttcatgctttaatcctagcgcttcgggaggccaaggtgggaagaccacttgaggccaggaattcaagaccagcctgggcaatacagcgaggccccatctctactagaaaaaaattctgaaatttagccatgcatagtaatgcatgcctggaatcccagctactcgggaggctgaggcgggaggatcttttgagcccaggagtttgaggcattggtgagctatgattatgccactgcagtcaagcctgggtgacagagtgaaaacttgtctcaaaaaaagagagaaagaagaagtggtaaaatacaagaagtaattaggtaagccttgcatatcaagcagaatggtaccaattttctcattctgccctactttgcccatgtctcttcccgtggaacccaggccctctggcacatatgagaaaaacaatccttgtaatcaaaccaaatgtatgaaatacaaatttaaaactctccccaattaaaaaaaaacagagtatagttattgcaaaaagattttgccatccactgaaggagtcactgtgcaattgttttaaagagcaagggctctggtttatctataataagattacattttcccctaattttttataatcacatttgttgtttaaggcatctaagagaaagagaaagtaggagggtggagtcccagtggcaccttgggcaatatcagatgaagtgtttggttgagactgcaactctgaaaactatgctgagttccacatctgatcataagaagttgcctcccttttttcccctgcagccctgtctctcctagaacaggctttgccaaggatgaaaagcctgaatgtcaaatcctttctgtctgccctggcagggaagctgttctgttttccaagaagcctttttttttttttttttttttttcacttggggaatttttactttcctcttatgggaagttgcttcatcatttcccaaaaatatactgtacctcctgtttaaacagggtgcccttgaagagctctggagcctgaagggggctaggggtgttgtgaagtcctttgtttcatgctttgatgtgagctgaaatgcaggctgtctacaggcagaagtctcagagtttgccacgactggggtctggaatggggtgtaggaggagaggctccctgggaagcaagagctgggatctttttaagcatttagtttatatatgttgtgagaggtaacagcccttccagacacagacaccatcaggtatttgtctagtgccttaaatatgtccaggatggtaaaggtgggcattctgcccttttgaggagctcatgaggaggaccatgtcacatttagaaatggtgaacaaaatggtatttaactactagattgtggagacatagatgcttttgtttagagaggaaggatattcctgtaaaagagagcactaagattgggccttgcattatggattgggtctgagttgatggaggaaaaactagaggatgttgagggagagggaaaggagaaatctctgagaggggccagaaggctgagctgaggccatgatcatgggtgagtgaggccagtgggggctgcctagttggacttgatgttggagaaatggaacaagccaaagtgtggagacatgcatagccagcagaagcatttagacttgtagaaagtggcagcctttggacgattctgaaaagaaatcatcatgaggaaaaatgtgttttggggggaagatttgcatatgaggataaattatagtatgcctccaggtgggctgcaggaaggagccccaactctgtccatggtttttggaaggagatcatgctgtaagatactgggaggggaaaatggcctggtagaagtctctttttgtcttgggtgagtgtggtcccatagtggtgcctatggcccagtggccttctgcagtcccccttgcagggcacagcagttggagccatcaggttgttgctggctgagtaggatcagctctcaggcaccaccctaagtaaagctttgatcaggccctgctgcaggtggaagtgatgtctcctagcggacccagtggggtcaagcataatgtgtagcaggtttcaagcctctgctggtcgttggagaatgagattggccaggagatactgtgcaggtccaagtgacaccagtcatttcatgcctaatcagcagtgaaagtgcggtttcctgaaacctttgctgatattgggtgttactaccttcctttgtgccttggacccccttaaagattttaaataagaaatctgatatgtaaaataaaggaggatcagtcaaaaagtgttcttagtagaatatgtatctagcagtcactctttgtgaaaaatggaaattgggaaaatattttgagagagattctatcagtggggacaagcaagcataaacatgttatgcttatcccaagatctattaatttccagtagaagtagggagagtaaattattgccaagggagatactgcccagttttcttaatggtcagaaaatgaatgacagtttcaatttcagctgctgtccctgggctgggcctgctgacttgccccaagtgccttggcacagaccgtggtgtggccagtggaaacatcgtgtctgtagccctgtgaatgagcagttcctctttgggggtcagctcagcatgttgccaggccagggggcaggtcaggccgaggctccactgttagccttgacttcccctgccaggagatgtggggccattatggcagaagaggagctaaggagaaacacctagcttggagccttgagtcttcaactttcacctcaagttactctccttaaagaccagcactttctttcccacttttcttgaaagcctctaggtccctgatcctgtttcaaactgctggtatataaactgctcataccactctgagttatcactttgttagggctgagtagcagggtggcccttaaacaggcctgactttcagtggctctgcccacgtttgcagaagtcacagtgggaaattttcacatttttctctgtccttctaagatgggacagttgagaggactcaggaagggttgagggagaaagcagcaagcccagagttcagaatcggttgccttgcagcttgtccttttgtggtgggtgatttcacttggtttttcaagtgaagggctgcaagtacaaatggactagccctaaaggacattacccacatgcatagagccatgaggcacattgattgtttcccataggccactttgctccccgttgaggaaggaaccattgtgctactaatattattccactgcaaggtctggctggaggcatctgcaaagactcttcagggccctgattgcacatttgacaagtcttttccatcaacaaagcatagagttcggggaaacccaggatgagctgtcattctgagtaacaggcttgtgcaggtgctgactagcttgacttcccttgattcagtgcaaaccttgggaccctggaggcagtcctggtctcttagtaaaatgcaggtgtgtgtgtgttgctgagtaccagagattttggagcctcgatactttcctcatttgtatgtggacctacctaagaatatattttctctaggttcaccaaagtgattccgggcctttagggccaggagagtaaagggtcaagaaatcttaaatttgctaaacccgtggtgggggagtgagagggtagaagtagtggggattctgaagcaactccaagcagtctgcttttaaacatttgtcatgggaacaacctgtactctggtaaattgtaaattgacaccccgattgcctttgtgtaatgaatttggacttttgtgcagcagctgagaaagaacctcttgagcagtcgtgaggtgtggctgcctgccagtcagcagcacactctgagcagcctcgccagctccctctgtgcagccgcatgtgctgcagcggtaacttgcattatcagaccttgattttgtaaggatgagttgaaaatggaaaaatgaaatgactaatggtagttgtaagggtaggtcttctaaagttgatagaattggaagatttttaaattcaatgaatgtgccagaagtaagaaatctttagtgtcagttgaatactcattgacttaagtcaacagccctgctcagttgtgaagagaaaaaaacacacatagccaaagaataatgtctaaaatgcccaggttatgttgtccaagattgtctctaaaaggcaggctataattagatattttatgatcttttttggctttctgagttgactttcttataatatgtaaacctattgtttgactatgagggtccttgctagggaagtagggggactacctgcaacaggttctggtgtaagagtcgtgcaaaaacaaagccctttttgtaagtgtgaaaggcccttctagagccgtgagtatacattatattttgactgtattagtctgttttcacgctgctgataaagacatacccgagactgagcaatttacaaaagaaagagatttaattggacttacatttccaggtggccaagaaagcctcccaatcatggtggaaggcaaggaaaagcaagttacatgttacatggatgacagcaggcaaaaagagagcttatgcagagaaattctcgttttttaaaaccgtcaaatcttgtgagacccattcactatcatgagaacagcatgggaaagacctgcgcccatgattccagtcatctcccaccaggttcctcccacaacatgtgggaattatgggagctacaagatgtgatttgggtggggacacagagtcaaaccatatcattgacctagtctcttcatgtattaattaatgcttttccccacatgttgtactcatttatatgctaatttctgccatctttattctatttagatacatttagcctatgattttgttttattttattttgagtcagagtcttgctttgttgcccaggccggagtgcagtggtgcgaacttgtcttactgcaacctccgcctcctgggttcaggcgagtctcctgcctcagcctcccgagtagctgggattacaggcacccgccaccacacctggctaatttttgtatttttagtagagacagggttttaccatattggtcaggctggtctcgaactcctgacttcagataatctgcctgccttggtctcccgaagtgctgggattacaggtgtgagccactgcacctggcctaatttttgtatttctagtagagacggggtttcgccgtgttggccaggctgttctcgaactcctgacctcaggtgatctgcctgcctcggcctcccaaagtgctgggattacaggcgtgagccactgtgcccggcctagcttatgattttaagctgtcagatgggcttttatttaaaagactggcctgctcaaacattgctagccttctataacataaaaccccaggtttggggagttaagagaaaaccaccaaaaaataaaccagctcttagactgtgaactttctcaaactctctagtttcaatccgtaactgtgggtaggtagagttgttatgtatgtgctttaaacgacaaagtttttaagaaaaactaaccaacattccacactggggtactattataatagagaaaaatctctctaattatagcagtattgtgggcttctcccatgcctggctggccacgacatggagttgataagcatacagtgtctttcgtacttgccgttacaactgttaattaagagaattcagctgtggcaccagctggggatgtctggctttgtggaagattgcaattagatgcttttttttctttttgttttttttcttttttttcccttttcaactttggtggaatgcctttgagtaggggcttttagtctcagcagtataaatactttataatgtgcctaattatgtaattatacagttatactcttctgtgtacacacacattgttttatgaatttgtatgcccttttctaatacatgaaacatctagcctgctttttggttgttgtggtagagccagactcctctctgcattgggcagaaagaagaagactagatgtatttactgattagcttctgattatgatctgccctacttctgttcctcttccacctccctcttgaccctctatctcccaaataattagcatcttagtagctacctagcaaagtcaaggtaatttgaataaaattggattgtataatactcttatctttccattagtttgcaaatgtagtccttcaaagtgtgtagtgttatttttcccagtcctctgttctaggcagttatagagcatgagcctggacgtgagagctcatgcatgcatgcaggcacaatgggacccattgatttctggcattcagcttgtgcatagaggacctgtgaccccagctgttagaaccaggacctgggagcagctgctttctggatccagtcctccagggataggccatctgctgccatgtgagagaaccctggaaaagaaactgaccacaagatatctttgtattccttttctgtgtgctccagcccctttagttctttcctgtcccctctcacctaggcaaacttgagaagcatgatgaatctgcactggaaaactcgcaatggattttccgttttcttcccctttccccactccaccctgtcagcacatccagcccattggaaaatagtttccaggggatgtaggcagacttatatgggcagcttcttcagtgggattggtactatttagcaggctttcattttattatgaataacatggctttgcattataggcctagaagtgtccttaaaatctcatctcatggaagaggaacccaagattccacattctttagccttgcattcagggcctaccctcttctggcaccagcctgattttctaaatgttcagttatctcctgctaaacctggaaacatttgctaacttctccgtacacataccacctcttcttgattctctgcctttgtttgtgcctttatgtcccccaccatgttcttcccactctcctttatccccgtcataatcctttatcccgtactcatgatcctacttcccgtgaagttggagctctgataccatttctacaatcttctttggtctcttccccattggattaatccttcttcagaactttctgtagcccatattgatttctaacatatatctattatagtcgtttattagaaagctcctagagtgtaggaccaatatctttttatctttccacctgcctaccttcacctgccacagtgcttttggtacttagtaaaaacttgttgaaaaaatgaatggcagaattaagctgagggaagagaaaaaaagaatgaatgggtaaatataatccttacatggattctggaagagaagcagtagatattactattattttaatcttgttggggctccttatctgtattcccaaagagactgaagtctcctcaagggcacaccatgtgtattatttgcccttgaatttctagcagcagcctaacacatagtgcttaatagaaatttgttaaattaatgaaggaatttgttaggaaagtgaaacctggagagaataagaatcaacacttgtaaatacttttaaaaatttgtttaattttttgagatggagtctcgctctcaccaggctggagtgcagtggcatgatgtccacttactgaagcctccacctcctggcttcaagcaattctcatgacaagccctcccgagtagctggaattacaggtgtgtgccacgttgcctggctaatttttgtatttttggtggatacaaggttttaccatgttggccaggctgatctcgatctcctggcctcaagtgatccgcctgtcttggtctcccaaagtgctgggattacaggcctaagccaccatgcccgtgtttttttactctcttttgagtgaaagttattagttattaaacctgctgtctggaggacaagagattaaaggtattttctgtacatcaatgtggcatttagacatagttatctaccaacatgcagtgtgtgtgaggctgtccgaggcattgtcttctgactgggcatctcagactggtcagtcaaaagtggcttgcgagagactagggtccaaagagccaaagaggccatgacaggtgacaggggcatggtcctcaccctgataaataagcatggttgagactctactcctgactgttagctagtttaggcccaagtttcactattttgaggttgttttgttttactagagccagaccaatatgtacacaggctaacatcaaaggccagtcctagaccttcagggccaggcatccatccttctttggactttgcagcaggcttgaatgcattcctgttgtttttaaagatccttaaagaggcttaaatgtggcttcctcagagaaaagcatgtgggaaggattcaaagagaaagcttgtaagaggagcagagggatcttccaggagcacggtatgctgagcaagatgcaaaagttcaaagtagtgaagaagagaactcctagggggatttgactcctcactgtccagaatcagttggtgaaagttcccctctggagaagtgcaaaggaaaccaagaaggcatggcaaactgcttttcccgtggtggtcatttgggagaaggtggtttaaaattttgtgatttaagattgttcaaaacagagaatctcatcccgcacaagatgaaggaggaagaatatccaggtcaatggacttggtaacttccgctccacctgcctgtgcacagtgagtacagagttccttaggcttgttggtttagaggcaatagagatgagacttgtggcttcgtccagccttctccccccgcaccaaaaaaccacacaccttttattgtctcttttgtatttgtagtccctgtctcatggtgggaccccaccccccagaatgtacagggctcacttcatggtatgccttagacccagtcacatctctttcttcagaaaagaccattcagggctgggtgcagtggctcacatctgtaatcctacctagcactttgggaggttgaagcaggtgcatcacctgaggtcaggagttcaagaccagcccaggcaacatggcgaaaccctgtccttactaaaaatacaaaaaattagccggacttggtggtgtgcacctgtaatcccagctacacaagaggctgaggcatgagaattgcttcaacctgggagaaggcagaggttgcagtgagccaagacaagatcgtgccactagacaccagcctgggcaacagagcaaaactctatctcaaaacaacagcgacaaaaaacccattcagacctccacccctcaactgctggtgtttctcaaagacctatggtgttttgctgatttggggccattgcctcagtggatttctgttaccatccataactagagtttactggtgtttcctttctttctttgcggttgtctaggcctttgtgagtagcagtggcctgttgagtgcctaagagaatcagcacactacctgaccccctgtttgggagtatgtggcagaggctgtttatttcaggctttggcagtgataacccagtggccctgtgtgttctgggcagtggcagaaaggtagccctctaattccaggtcacatccccattctgcatttagtgacaaccttcctttcacatatccgtcttagaagtcttgtgttctcagccaggcttggtggctcacgcctgtaatcccagtactttgggaggctgaggcgggtggattacctgaggtcaggtgttcaagaccagcctagccaacatggtgaaacctgtctctaccgaaaatacaaaaattagcccggtgtggtggcacacacctgtagtcccagctactcaggaggctgaggcaggagaattgcttgaacccgggaggcggaggttgcattgagctgagatcatgccactgcactccagcttgggtgacagagtgagactccgtctcaaaaaaaaaaaaaaaaaagaagtcatgtgttctcagctgaaaatgcctacatatcttctcccacttgcaactttgctgtctgtgatccttaaatagctccattgtgtgtagtacacagaaattagtgaaggaaactgtcctgccttttccctccacttctctggaaaaatgtggccccacctgagatatgaactgagtcctctgggcacaactaaactcaccaggccatattcttctccaaacaggaattatagcagcttttgtccatatgtatcccacccctatgttatactttgtaggtcttggggtaaatttttttctggtggcatcagaaaaaatcaagaagcttccttgtagaagggccagccagaatttgaatgcagactctagtacttagaatccaggtgacctcagtccattactaaatttttcagagcctcagttttttctgaacaaatcaagttttataccaccttcttcctagggtggaagaatttaataggataacacttttaaagtaccagtgcagtgcctggtgataaatgttaattctcttccttacttgtatccttttggcaacagagatcattaaatttgttttaaatttgattgtgtgtttcttgaggccctgctgtgtatgcctgggactgtacttggcattaggagttaccattagctggtaggattggaaatgaaaccacaattttggcctttgtacccaagagtccaaccctgttttaaactctaagccagactcctaagtcagttatcacctgctcatcagctttccttctgagctgccgtaaacagccatctgggcctttcctgagaggaccagtcatctcctctgggagatgaggaattctgagaggggagagcaaacacatattttagctcaggtaggtgatatggtgaaggagatgagaacaagaagtgacaatggctgatgaggaaaaaataagcattctctgctttttcttaagcctttaactgccactgtcaagggaaacagtaacacttgctaatacacgtggaatagcctggctccctacctccattgtcatcccaccatctggaggtggaggtaggagacagctgtgggctctgctctataggtcactgtactgacctatagcagtggtagtggctttgggcactgagtgggctagccctgtacctggagcagcaggataaaggagaatggtcctctggcctgcccctccttgtagcagtggtaacagtgggagggggaggggttcccagccccagctggcagcctgtttccctgggtccctgagctgcaagaacaagaggaggtgaaagggtaacaggccatatggagtccatttgtcagccaagagcagcctgggctgtattgtcgagaacgggaagtgaaaaaggagccggcttattactgaactggaacaaggagagagcaaacaacaccccccaaagtgcttatcctgctctgttttctgcctgccccctctccaaatatccagaaatttctgaaataatcctttttctttttaccaaagcctttgcccattccaaaaatcagagataagggtttagtttgctacatgaaaatttatcagtgcctagtaatgtgccaggcatgatacaagaccctttcaagtatgcagttttgttagtcttctaaaaaaacctgtggagctggatattggctgctaaggactaaggctcagaggagttatgacagttgacaaggctgcagagcaggcccctgggtcaaacccagattcatctgtctgacccccaagactatgctcttactccatgtggctctggtcctgttaggtaggcagtgtattttcacagttaggtaccaatttggagaatacaaattgtaccctggagagggatgctctttgccgttgtctgttattgactcatctcaaatcaaaaatcattgtggctcattgcagttgaaaacaagacagtgttttgaaataaggacaaaattttgcaagtcacgttggttttctactaagcatctactatctcctggattatttgtcaggtactagggatacaaaatgagcagaacaagtctctgccctatggcttagatgtgtgggttggtggttattggggaaatggaggaaggaccaacctgtgagaaaacctgcagagactacaacatggtgataggttacaaataggagtgaagatgatgtaatgggaacccagaggaggaataataaagctgctgttattgaacacttagtatgtgacagacccattaccaggtactttacctgcatagttgtgattaaccttttgaatccccatgttaaaaatgaggaaactgaggaataggaagatctccccaggactacccagtgggtaactgttggagcagtgtgcaaccccaggccgtgaagtctcagcccaagctggtaagctccaccctgtgctgctcattgtttctctctggccatgcctgggaaggtggccttggaaccttggagatgggtggggttccagctgactgcatgtgctttcagttcagggtttctaggctgggagagaaacagtacttttgactgaatgactaaggactttagaggcttaggtgccactaaaagcactttcttttattgaacgctgtgcctcaaacatgaaaactccaggtgacaggagtttttatgtttgaggcagggtgcagtaaaagaaagtgcttgttggctctgaggcctctggctggcattttccctctcctgtgagggggaggaagtgaggggcccaggcctaaaacaagatggacaggtccgaggcctgtcccacctgtcagttgctgatcttccgaggagggcttaggttgagcctctcttaggaaggcagtggtgggggcccgagaagagccacaggaggtatcctgagccatgggtggtttctccctgtgttctcccaccccagctctggtgccacaccctgaaaaaggcttgagctactgcaggctggctctcccccagtgagtgggaagttctcatgagaaaagggatcctgactggacaataggcttcctgtctgactgctaggaagatttgtctcataggagaggaaggttgcaaatggcatgagaaaccatctcacttccctctcactgcagcctgttttagacttgactatttggcgggatcgggaagccagaaggctgggcagagccatggaccagagcagccccaggtatctcttaagtagtgggactcctgcctgttttccggctctcaccacaagtccacagcaggaatctgtcccaatgcaggaatttctgcatggacaggatgatctctagcccctcacaccttgtgctgtatccaaaaccacaatggttgcaggacttttgcgaaggaaccttggagaggtagtgaggcccgccaactttagacaaatttgcaaatgtcagaagagatctcagaggtgatctggttcattgccttcatgtattgaaactgaggcccagagtctacgggcagtacccagtttgtccttgtcactggactctgccatctgtggctcccttgacagattatgggtgtgagagaagcctgactccgagaccctctgatactgcccagtgctgtggaatgggaatacagccttctggggttcaaatcctaactgtgccacccacctgctgggtgaaattgagcaagtatctcaacccctggctcatctgtgtaatgcattgttatgtttctagagggttttttgtgaaacttaaatgagttacatatgtaaagtgctcagatagtgcctggcctgtagtcagtgaacacaagctgttgttattaggaggcttcagaagaaaccttttgaccatatcagatgtcatcacttgttttttcttctttgtatttgtctggaatgctctaattccaacttgcctgggaggctttctttaggggaatcacctcccctttgaaaaaggctgttcatactgggtataactctttcttttatatgctgtacgaagtagctggatgtctccaaagccataggctgagcacatcaaatggggaaatgagccacaaaacagaacctggcaggtttcctgatgccctgcccccctcagcaggccccggcttaactgagtggtcaggcttgcagcttagaagccagagttcctggtgaatccagccctgccaattacaaatgtgtggcttgaggcagatcactcaactcagttaagccttattgtccttatctgtaaagtggagaaaatatagtacctgcttcatgtagagagagaacccagaagagtacttggcacaggtaataaactatctgtttgcaataattactgttttccttattccaaaacaaacagaactatacatttaaacacctttgttctctgtattgaccttgctttttctctggatctctttgcttctacaaaccattgaaggctagaagtagaaatataacctttatatataagaaagggttttgagagcaagcacataaatagtgcttttctaaataactttaagagacccttagtgctaaatgcctccttctttccacatcttcagcctcacatttcatgccctgtcgtgtggttctgaaccttttccactgttttcagatccccagacctgtcctgactgctggccaaggactccttcactgagactgtgctgtccactacaatagccactactaggtggctgcatgtggtgactgagaacttgaaatgtgtttagtctgagttgaggtgtgctataagtgtaaccggaaaggggtccagattcagaccccaggagagggtccttggatcttccacaagaaagaattcagggcgagtccacagagtaaagtgaaagcaagtttatgaagagagtaaaggaataaaagaatggctgctgtatagacagtatagacagagcagtgtggcatgggctactcggctgagtgtatttatagttatttcttgattatatgctaaacaagaggtggattattcattagatttccaggaaaggggtgggaattcctggaactgagggttcctccccttttcagaccatatagggtgacttcctatgtagccgtggcatttgtgaactgtcatggctatggtgggggagtgtcttttagcatgctactgcattataattagcatataatgagcagtgaggacaccggaggtcactttcgtcaccatcttggttttggtgggttttggtcgacttctctgcccaacctgttttattggtgtggtcttttgtgacatgtatcttgtgacctcctatctcatcctatgatttagaatgccatgcctaacctcctgggaatgcagcccagtagatctcagcctcattttactcagcccctattcaagatggagtcgctgtcattcagatgcctcttatataagtgtacagactactatgagaaaaagaatataaagtatctcattagtgaatttttatgttgactccatgttgagatgtaatcagtcaacatattttttcatatgttgggttaaataaaatattaagattaatttcacctgtttccatttatcttcctaattggctactagaacattttaaattacatctgtggccatgttatatttctgttggacagctttgtgctaggtttgtgatttccatccattccttcctcctctccttagtttctactctttttcttctttgcctcaggctcttaccctccctgggtgccgatgaatgatcacctagccagaaggacaccccaggctattagaaaagctcatatttgagcagcttgtgtcacatttaacacttacttcattggtttagggtagagttggctgtgaccatgtctgtcttctctaggttgtaggcttgtagtgggggcatggttctgttaccggaaagaggtccagatccagaccccaacagaggattcttggatctcacacaagaaataatttagggaagtccatagagtaaagtgatagcaagttgattaggaaagtaaaggggctggatgcgctggctcacgcctgtaatcccaacactttgggaggccgaggcgggcagatcacttgaggtcaggagttcgagaccagcctggtcaacatggtgaaaccctgtctctactaaaaatacaaaagttagccgggtgtggtggcacacgcctgtagtcccagctactcaggaggctgaggcaggagaatcgcttgaacccatgaggcagaggttgcagtgagctgagattgccactgcactccagcctgggtgacaggggacagggcgagactcatcacaaacaaacaaacaaaaaatgcactatagataatttaaatgtaaccttctcctactcaaccctaatccctttgaggctgcatgcatgtcacactgatctttatattccctgctttccacaccttgttttgaaggagctcaagtatttgttctgtttgttaaattgaatgctttgacccctggggcctttcctggagcttattttgctttgcttgttttggaatgttgtaaaagtttgttttgttttaatttgcctccttctgaaaggttggcctgcaaaaccaacaaaaccagggaacctttagaaaggctggtgagggtcctcagcagttagtttctgctgagggtgtcaggctgaggcgacggaggtggtggaagtatcagctagatcattttgcgtctcatctgcattgttaccagggtggactttgactgaatgcctactgtgtgcactccctgtgctcactgaaagcctatgtggctgtgggacagaatggaaagcagagaggaagctaaagataattcattgattttttttccccctgtaaaattgtctggctttctccttttctttttaaaattatgtggcactgccacatcaggtgagttcattgtcttcccagagttaagtacagagcttccttctgcgaacctggaattgtcagagaatgatcctggtgcacagatcaagacagtttcttgcctagactgtggcttctggaagccactgaacaatttctttgccatgtgggttttgcctttttttagtgttcttcccaggcatcactgagagggtcctcttcaacacctgctgttggccaggactctgctcttggtcaagaggatcatattttttcatgtgttctttttcttttcttttcttttctttttttaaacagagtctcactttgtcgcccaggctggagtgcagtggtgcaatctcagctcactgcaacctctgcctcatgggttcaagcaattcttgtgcctcagcctcctgagtagctgggtctagaggtgtgcatcaccacacctggctaatttttgtatttgtagtagagatggggattcaccgtgttgaccacgctggtctcgaactcctgacctcaagtgatccgcccaccttgacctcccaaagcgctgggattgtaggcgtgagccactgtacccagccttttcacatgttcttagtgtcttaaaatgacttgccttttttttttttttggaccctttcttcttaggcatccttatttcttctttgaacctggagcatcttatgacatacttcagcttttttcttttctatgaccttcatagatgggcataaaataatttttgtactgagtttattttgccatactgaagcggtgttgttgtctggggtaatatctgaggttcattgtcccacagccatggaaaattaggatgcagacacaccagagtgaggttaagagtggaagtttaataggcgaaagagaagagctctctgcacagagaggggtcccagagaaaatgggttgcacttctgcagttaaatgaagaaggttttatagatgagcttgaggagaccatttacataggggacgaaagattggttggaccatgtgtgccatttgcatagttgtgaaatagctggccgtcccaccctaatcttttattatgcagatgggttctctacctggtgggcaccatgttgcctggtccttactgtacacgtggtgacaaagaaaagggaacatggagcctccactctgaacacacctggcttccaggtggcccttttctattggcacagctgctggcattcacctgtgcaagcttccagcttgcttatctatgcagctcgatttttcaggctgctctttgttagaaaagaaatgattttgaggctgcttttccttaaaagggaaaccttgctgaggactcttttgccgtcactatctgcctaaataatttctttctagctcctgtatcaatactaggattgctataatgttgacataatctaaggggtctctcctacctctagtccatcttatatcaaattataaatttgcttttcttataatgctacccttctcaagaaccttcagcggctcccccttttctttgactataattataaatatctccttttgtaaggaaggtcctctacaagatggtttcatcactcttcatgttatttttttggacttttaaaaaattactcaacccagccaaactgggctgcttgctgttctcagaagttaacctacattttcccacttcagtgcatttacttcaaactatgacctcccttcctgatgaagtgaagccccatctgaagtgctacttcctcggagatcctttcctaggctcccctattcctgctttgaacttcctctcttgtggcacaaatcacattatttgacatgtgttagaataaatttgtatatagagtatctttggaagaatatggtagaaactggtgcagtgactctggaaagaggaacccagtgacgggacactgtgcaccctttttgaatttaataccttgtatatttcccatgagtctgttttttttgttttgttttgttttgtaaaagtattttaaataacaaaaacctaatccctaaagcattacaagaaaatactggagagtatgtttataaactcagagtagagaaagagtccttaatccagaagccataaagagaatgattttttaaatatatgtgtgcacttaatggtcatatccctatttggcaagaaggacctgaggtgcttatatttttgtcctttttcagagcatagcacagtgaccccctactcagaatcagtaagtattagttgaattgaaattaaactgaattacaagtcacttctttgcagtcctcacttttttttttttttgacttattatgagtgctaggtgaccgccaggatcccgctcaaagattctgtggagatgtgggttttatggaaagagatacccagcaaagcaggagtggctttagaatcagcagctcttcccctgagactgtccttcccagcacattggacttgtgtgtgggtcctgcctgctttcaggagctgccatggggtgctcagcattaattatgccacggaaatgaaccaattagacacagtccaaggagagccagggagtaagtcagggagatctgtggcaggcctgctgccctgaacaaaagagggaaagtgtaaaggctaaagcagtttgcggaggtttctttggaaatctagctggccagcgctctgaactacttggccaaagttaaagagcaccagaaggagtgtttgcgtttttctttctcctgttcaagactctggtggtggaggagaatagggacaagttgggtccttagaggggacttggggggagcttactggagctcatctcctagtttcagagaagctgccagacttctctggatccctgtggcacctacccagctttgttttgttaatagctttttaaaaatggcatcttttttttagtggcatcacctaaaaaaagaaaagaaaaagtgccttttctccccatctcaagtgataagcaaattgagggtagggagccatcatctcttttccatttggtgtccactccccaacctggctggcagtcagcttgcttaacagccatttgtagattggaaagaagaggcatgggtgagagaggctgtgagggcacagctgcagggtggtgtggtctgcccctctcgtggatgagaaactgccttatcttggacagtcaggcactgtggtgtgactctcagtcactccaggcctgtcagaggaaatgagaaaaagaaaacgaccgttcttattctcatacagatgtccttgtgatattcaggatgggggcaggttatttgtcagcaaaattgaatttcctttggaaaacttttggtctttattgcattcatggttgcctggccattctacctcagcccaacattccaaacagtgattctgtagtgcccccacttttactgttttggctggtaatacccggcagtccaccacctggggtcttcagttttgcagtgtcagtccagagtggaatcagaggttgtccttttcctcctcaggtccactcagaccttccagatcctctgacttaccattactgcaacttaccagggttcccaccatacctaggcactgcctgccatctccctaactgaccagtttcaagagggcaaaggggaggtaaccttgacacccataccccttaaaggccatgcagctcatggggtagaagcaatgtctgctggtggaaagagcagaggtttagaatcagaagatttgactgtgaccccaagcctgccatttaccttgctgtaagcttggctaaaagtcacttaacttttgtggccctcagtgtcttcttcttcaaaggagagtaacgatagctgtctcacagagttgtcaggacaaataaggcgggaggtgaaggtgcttttgaaactaggcagtcctgtatatcagtggaaaatgtggaatttatcatgggatagagacaggtggtgccattgactactatagtcagagaatggaagatgcacagggggtttgggaagcctcccagggaatctatcagaaatcccctctcaggccaagagtgcacgtttttattatacaatagagtcttttctgacattgatagtggaaacaaggccaacatttttcctcctttcactgtgatttattatgtgtgttacaggctttattacataatacaggctttattaaaactattatgtctagatctctataggttcaagactttagagtctgccgttcatttatggatggaattctcttaaggcatggtggggagggagggggaaatgttgcaagcagccacttcccctgttgccagtatacttcccctctgtcagtggcaacctgagtttccagggtttggttaacagttcctccaaggaaagggttatttcctcctcctgtgtttcctgtagaggccttcagagctgcgtcactgagagcagactcctactggatacctcaccactgtacccctgctctctccctgtctttgcagtgtgccccctaccaccggagccagagaatggtggctacatctgccacccccggccctgcagagaccccctgacagcaggcagtgtcatcgaatacctgtgtgctgaaggctacatgttgaagggcgattacaaatacctgacgtgtaagaatggcgagtggaaaccagccatggagattagctgccgtctcaacgagggtcagtctggcagatgaaaaagggatgctgctggggttctgctttctgttaactcacaggatgcaaagcatgcttcctccagagcactctttgctgtggtgcagcccagccccagttgatgctctgcagcctcccttccttgggtcttcatgtctttgtggaagatacttgaggttgctggtgcatgtcctattgcatttcattgagccatctgccctgctctgtaaagcccgtttgatgttcaggatctcttgtttgcatggccaagtgttggtgacccttgaccatgttctgccctcacagtgagcacaatgctaataccttctctaatgtatcgtccatttcatttttccttgaatggagctacagaccagctggacaaaagacctcccacccttactgcttcctcctgtcttgcatgacaggaaaatccacctgcttgcaggaaagtgtgtcatataaccatctttgtgcttcccactcaggcttcaagaccagagcatgtttaacccatgacaccccagaaatgggtgggaaccaacctgagagttacaattaaagctgtggatcttaagacaaggttttattacagtccagtttctgtaaattaatcctgccacttgggaagaacataggtagaacttaagatggtggaatgacatgcccagttaaattgtcgatgtttacaaacttcaagcttttgaggatgggatcaaagtggtttataaaggtaaaatctctagggttaagtgagtttatgtgtcagatggacctcaaagattggaagtgaggggaattttttattcaggaaacaggatagggaaatggtccttttccaaaagaactgtgtatacataggtcattctaagctgttattcctgaaatgaccctgaccgtaggatgtctgtattgcaccattcaggaggcatttgacaagatcagctgtggggcccatcagctgttttgtgtatttgggtacaaaacccttctgatgatggcttgtttttatagataaagacacccacacatcacttggggtccccacgctgtctatagtggcttctactgccagctccgtggcgctcattctcctcctcgtggtgctgtttgtgctgctgcagccaaagctgaagtctttccatcatagcaggtgagtccagtggcagagctgacatgagacaggcaggtgcaagcattactgtgggggccagtctttggtggagggttgctggtggccccaatctctgtgggtctgtgtgtgtccagggagtggggagggccctgccatgtgtcaaactcctagatgtgcctaccattgtgcttattgctttgcatacattatcttaatcctcataggaacattgcagatgaggaaattgaggctcagagaggttattcactcagggttatacctctagatgacaacagagctcagaactgaggctgcgcgcggtggctcatgcctgtaatctcagcacttagggaggctgaggtgggcggattgcctgaggtcaggagtttgagaccagcttgaccaacatggtgaaaccctgtctctactaaaaatacaaaacaattagccgggtgtggtggcgcgcgcctgtagtcccagctactctggaggctgaggcaggagaatcacttgaacccacgaggcagaggttgcagtgagccgagatcacaccactgcgctccagtctgggagacagagtaagactctgtcccattaaaaaaaaaaaacaaaaaaaaacggaaatctgttcaattccaaagccatgtcatttcccctacaccagtcgttctcaaagcgtggttccagcagcgtcaggatcatggaacttgttaggatcaaccaaatgagaagctctaggggtgaggcccagtgatattgtttaacaagctgtccaggtgattttgatgaacacttaagtttgtgagccactatcctgcactcctggttcccagtcctggctgcaatatagaggcacctgggggagtttaaaaacaaatatcaacacttgggcctccattcccattctgatttatttggtttggaatggaaccctggcattcactttttataaaaagctcagtttttctgtgcaactaggatttagaaccactgcaccacactaaggagaaacaaaggaagtggattttcttgcctgcctttatcagtttccttttccagtctactgctttagccacaagttgtctaggggcgaggagcatgaagggcagagctgatggtgctggccctgagtggattcccgatgatggacttttcttccaggccattgtggcttctgcagttacttggcccttcctggcagttcctcattccctcttgaggagtaacattttttatatatcttcacagtccttcatcagtcactgttataactcacaaacataaagggccaaagtaaactgcattcagtaaaatgttccaaatttggatttacagacaaggaccaggctagatttaatctctgtgtactatgtgtgattttctttcttttattttgtttttgggaagaggctagcagttatttttaaaggctattaattaataggatgaagaggatttgaaggggattgtttacttgaaatgatcagctatttccacctaaagtcaaactgatcagttctgcatctcatctaaatgagggagttttcccccctatagttaacttgtaagtttgttaaaagtaactggctagttttgcttgatttgagtagaggggagatttggttttcattgtagaccccatttaaattttgtgctgtgtacatatattactttttaagccaaacactattttgagtaacaaaagtcaagcacatgccagtttacacactgctttcttttttttctttttctgagacagggtctcactcatgttgcccaggctggagtgcagtggcgtgatcacagcctactgcagccatgacttccctgggctcaggtgatcctcccacctcagcctccctagtagctgcaaccacaggcatgtgccaccatacccagctaatttttttgtattttttatagatatgggtttcgccacattgccaggctggtcttgaatcctggtctcaagcagtctgcccacctcagcctcctaaagtgctcccatcaaactttcccttccttccaaaaacctctgccacttctctcctctcagagtgtatgtagcacagattttactgccaagagcaggtgaggaaattgagaactactaacaacaatctagcaacaataatatggtctagcagcagaccatctatatttcttgaattgatgagctgaaaggacacagcatcacctaggattggcctgaatccaatgctgaggaaactattagacaagtccagattgtgggacattctttgagacagctggcctggactctttaaaaaaaaaaaaaagccaatgtcatgaaagaaaaactatagtggactgtttaacagattaaatgagatgaaagacacaggacaattaaatgcaatacatgatacttaattgggtcctggatgaaaacaaagaagactgcagctgaagtagatatatttttggatagttaggaaaatttgtgttattgtattacaccaatgttaaatttctgggatctgatgatgtagttgtatcagaaaggatactcttaggaagtatatgttaaataacatcttcaccttacttttagatggttcagggaaaaaaaaggcatgtttatgtgtataacaaaagtgatccccaaaaaagatatccgcatgaataagcctcacacgtatgatgttgagtaaaagaagccagaaacagatatatactctcacaaatttactttgttatcccattcaagtaaagattaaaaatatgcaaaactgtccaggcacagtggctcacgcctgtaatcctttgggaggaggaggtgagaggattgcctgagcccaggagttcaagaccagcctgggcaacatggagaaactccgtctctacaaaaaattggccaggcgtggtggtgcatgccttagtcccagctacttgggaggctgaagtgggagcatcacctgagcccaggatgttgaggctgcagtaggttgtgatcacgccactgcactgcagcctgggcaacagagtaagaccctttctcaaaagaaaaacaatttttttaattaaaaaaaaatatatgcaaaactaaaccacagtgttgaaggattcatgtttaggtagtagaactgttaaaataaaaagcaaagaaatgattttcctgaaagtctggatagtggttactttttgtggtgaggcaatgggagtgattttgggacaggtgcaaagggtctaggttctgggcagtgttctttttcttgacctatataggagttttataccagtgttacttttggagtaaatcagctagctgtacacagatttttcttgtgttctgttttctgtatttgtgttcaaagtttttaaaaagtttacaaacttttaaaaaaagcagtatggctgagtcagaacaaaattattgtgatttctagtccagtatcccacacttccctgttttttaacagctttattgagatatattccacataccatacagcgtacctatttaatgtgtacagtgaagtggtttttagtatattcacagatatatgccaccatcattctctcacttccttattttagctgtgctgaatgaatgcctttatttctgggtctctaggctcctagtttttccacagggtaaaagggccaggtgcctgtgtacccagaggttaagaacacagtttttggaggctgatggaaccggattcaaatcctagctccatcctttaccagctgtgtgattgagggcaagttaattaacttctctgagcctcatttgcattcttggtgaatccctacctgaaagggctcaggtgagaatccagcatgataaggtgtttaaaattcctagtgctttgcctggcacatagtaagtgctcaaaaatggtggcggctgctattattattatcatgcctgtttctctgtgtgtttattctaattcatcctttgtcttttcctcctccactccaggcgtgaccagggggtatctggggaccaggtctccatcatggtggatggagtccaggttgcactaccatcatacgaggaggctgtatatggcagttctggtcactgtgtgccacctgctgaccccagagtacagattgtgctgtcagaagggtctgggcccagtgggaggagcgtgccaagggagcaacagctgccggaccaaggggcctgctcctctgcaggtggagaagatgaggccccaggccagtctggactatgtgaagcctggggctctcgggcctcagagactgtgatggtgcatcaggcaaccacctcttcctgggtggccggctcagggaaccgccaactggcacacaaagaaactgcagattcagagaacagtgacatacaaagccttttatccctcacgtcagaggagtacacagatggtgagtggtccaagctgaacatgaattattagctgcttagggtccttgctgggagtgaggaaggactgtgagcctttctaaataattggtatatttttagcaaaaaaaagatagtacctggggtatttgcctacaaaatagaatttcaccctcagagtactgagtagggctttgggctctctgtagtgagacttttcactgacgcctgtgaattctgatcgtttggagtctctgaggccattcatagtcacagagccttgctaaatcaaaagacagcttgctggagttgggggtggggtctgtcctcttgttataaatgttatgttcctgaaaggtcaggaatgacaaggaggcataggttattttacagaaaaatgagagcctctccagagcagacagctgctgctttctaaacaggagtgttccgggtactatgctagtttgttttcttgcactatctcagttaaacatcacagtgatcctaagacacaggtatttattgacatccccattttacagctgaggaaactaaggctcacagaaggtaagtcacttggcccactggtaaatggctgagctgggatttgaagccagattctgccttccaggtggctctagcgcccttgtggcaaacaatcatagaatgaaattactgcctcctgatgtttctgcctttgccagaggccagtttaccctgggcttgagtctgtcactttgaaagctgtctttaaggtaaatcccaatgtagttcaggatgagactaaccctagatgcccctttctatagtgaagacttgtacactcagaaagcctccctaaaagagccttagaggaaactttatgcttcctgggtatcctgggcatagtaaatgtctaaggtttagaatatctgaaagcaaagaagttggaaattactgaaagcagatcatgtttatggagcttcctggttatcaacatcttgccttcgtttttcttggttggccattaaaatagttgacccaggtttgaatctggaagccagtaaccccacagtcagccagccacacatattgtgagatgtgtgtaagtgtatatcatagcccttatcttcccaaggagccaaggtggggccctcctcttcctcctcttccatgctacctagctttgttttttgtatttaacaagcattttgagaggccatcttgtgcctaatgctggattaggtttcaggggtgatacagagaaatatgaaatgtgctatcttcctgcatggagtatcagccatttgggaagatggtggggcctatactcaagaaataatagaaccaggaattgtagtgtctgtgtcagaatgaggggttcagaaaacaagacacattaagtcagtaagttccttgcaggccatgcctgagctgtttgggactgataataccctaggaagttgggagcttgaggcccacagcatatgaagaagctgaaaccaaaagaagggaagtgatttatccaaagtcacacgactggcagatggctttaggaggcagtgggacttcacagggctttgtagcctcatagggtggaattaggagagaaagggaagtgactagaccagcagagctaaggcagagaggaggatggtttgaataccaggctgaacattgagtttttttcacataggcactgggaaagataagctagaaagtcataaaaaaggaggtagggagtttttgcctacctagaagtgtatgagtgggacatttactttctttaaattaggggctatgtaggatagcccctaagttgcagtggggtcgagagtgctctagagttccacacaaggtaaccactgtgcttttcttctggtcttcctgcagatattccactgttgaaagaagcatgagggcagcggccagcctttcctctctgcgaggttctctcagcccttcctccctctccctgtgggattgagcaccctgtactctccagccaccttacctggatacctgagctgccacctgtgtatctgtgtatctctgagggccctataggcccaccttgctggaaactcaaggaagattctcgccatctgcctgttggacagctggaggagctggctctttgcctggccccgccttcccatctgtcagagacatatttgaatgtgctggatcaaaccctcccttttcctaagcctctgggtcccctccagccagctctttggcggcagcccccaccagctcctgtgggcctgagtgctgctgtgtttacttgtgcctttcccccaccctgtccagtttccctgtcatgcagacttgttgctgtccacaagccttagtggctgcactgctgccccctgccacacagggggccgggcctgggtctgtcctgtttcctttgagggttgcccctactgccctttgcaggaacagatccaggtgtgagagctcttgagtcaagagtggcagaagtggctctaattggggtgagagtgtagtccctgggcttgccctgggttgaccctggtggcatatttccttggccgaggatggaagatttggagaatcatgtccatgctggcccaggacccagccatctggcccaaaggcacaagctcctggccctgttgagttgagagtttccaagaagcatccagaagatcccaagggagagaaggaaaatggctgataatgattgtcttcctaatatgcaagttctcacttcctacttccagcatcggccttcctggccttgtcttttttttgtttccctggagtataatgggaagttgcatgctgcctcctgggttttatcccagatagctctggctttcttgctgcccacaggggcctggggcaggaaggagacttgctgagatgccatggagtgcccatctggtcactggcagtctgggcaggttgcccctttctgggtttgtggtgacggaggggaggccgagaggcacagaccaagtccccgggtggctgcaggcagctccagcccggtcctgaggatcctcctcaccatggtcacgtgccttagtaactgtgcccaggaagtggcctgctgcttgctgtgctgctgcttttcctacttctgcccttccctgccacccctcgcatgtcacagctgacaagcaattccttgtcttccctggccccctgggggaagggctgagaaacagtccatgtgcaccccaaccttaatggcctgaggtgggcagaggggtgtggagcagcctggagtacagggccctgggggaggagcccactgatgaggggcgctctcccatagccatgtgttgaatgctaactaggctggggtggacgaactctgccaactgctgtcatcttagaagatagatgcagcagtaaggaatgtttgttttgcttttttctgaaattttctgaagcactgtggctgggaaacttcgaagcggaccctgtgctgcatgtctgctcctcccctgagcctgtctgcttgggggtggtaaaaataaaaatcccagtttattttcagtaccttacctaacagggttggctccaggcgtgggtggcctagaagatgaggggagtggtcttctcccagccttttaccctcttgcctcctgcctccgcgcttacacacgcactttaccacccggtcattccctggcctcttgctgccacttgtagtcttccttccttcctctcagggtaagggcagtgcctgctgtgcctgttggccactcccacacttcccctcccccaggagccctcatctgctgtgctgagtccaggaaagcatagttaggtagggagctggttggagaaggtgctagaactagaaggcagatgagactagcatgggcccacctggagggctgtccctaatggccccagtcgccttacctcacccacagcagtgcccttgtcttcctccaaaacagaaagcagtgacaaaagggggaggggtggtaatctgaagtctcactgctgagccttcagcttttatttttcactgtttcaaaacccgcattctattctagaatggtttttaaaatggaagatcttacctttttctatcttgttactctggggttttgtccccctaagagattgcactttttgtttggggtttattcagctgcatagatgaccagcttgatccctggtgaaatgaaaagccttccttctcctgaagcctctttccgccctgccctccactaacaacactgaggagcacaagcccaggcttgcccacctggtaggaaaggaagaaattagaacaatgggagccttggctcccctctcgtctcctcccctccttcttgtcactggctttgatgaggcccacttcccagaggctcctgggcctgtgagtgcaggagctcattctcccctcactgctgaagtctgtgacagcttcttcctccagttatgtctttcttccaaagcaatttcttaaccatcagccatgtgctgctatttctagggcttctgggctttgtcccttactgagagattagggactccacagctgccttgaggtagggcctggctgagagacaagggtagcagcaggtggcaggctgttaaaagacaggctgcctgaggagcctggagcaggtggaaacaggtggaagaaaccggccacagccctgctttaccgggctcacctctagggcattccagcaagaggctgatgcaggagaatggccagcaccaaaggacatttaaaagagtttttgggtttttttgtttgtttgttgttggtgtttgtttttttttttttttttttggcacacttgagctgactcagtgcaggtttaatatcctggtgacttgcagtcacattctaatgactttcaagggccagaatatggtgaaaatcacttaaaatatccgtcccttccatgccttagtttagcaggtaggctctatcttttgccatttctgtattttatgtgctgtgttcccgtttcactgggtatgaactgtgaaatggactgaatcctggccactttatgagtttgtttggttttataaggcatttcaatgtacattctataaatacaagcactccatttgcaaacagatcttaagctaatattttctttcccattcatcttgccctccccctcctcccgccagctttaaagttcagtggagaagccagatggcaattcagacaaaggtatactcttcctgcttcatgggtggtggcacgggaatagatagcccttagccctttccctcccagtcccagctgagccctcagaccacttgcttcccacataacaatgtcgcctccatttccgaggaacatccttgcgtagagaatgaaatatgctgcaatcatttctgcatccttactcctcacccccaaagaaaaaaaaaaggcctagcagggaagcagcatgcaggcttcacagcttaatgccaaggacagcgagtgaggctgggagcttctcttgggcctgctgggtctgtcagctctcggaatagggacagtccttactggtgccccaaggtgggacttggagaatattttgcttggcatatgtttggtctgaatggtgtagttgctggttccctagagaggaaaaggtggcaggcccagctttgctgggaaatggctcttaatttccagttgaaaccctagtagaattgtgaatgaaaacctcaaggttgagcccctctgccaagcagcagagctagtagaaggggatgcaggggcaaagcactcagttgccaagcaaggaggagagatgtacgtgggctgtgtggcagtccccacaccctgccctggcttcttcaggttatcgcaccactatggaatcctttgcagaatggtactcatataatggtttaaaacaacacattcataattgactctgtgcaggatgtcactcaatcagtttgggtttgctttattttattttatatatatattttttggtatcctgtacattgcagtgggtgtgaagatagtattttaatatttgtacaaagtttaatttaattttaattgttctatgtatataactgcatttctaaataattaaaaaaaagttcttatgaaggcaattctgggagatgtgatccttcctgaaagtttttgcagaaaccttagattgaaagagcatatgtgggcaggaggtcatggaaggatgaggcactagctctgtagggagggtgcctggcaagaggtggaggagccaggatggagagcactttgggaggccaaggcagttggatcacttgagactaggagtttgagatcagcctggccaacatagcaaaagtccatctctactaaaaatacaaaaattagctgggcgcggtggtgcatgcttgtaatcccatctacttgggaggctgaggccggagaatcgcttgaacccagaagacggaggttgcagccagctgagattgcaccattgtactccagcctgggcgacagagcgagactgtctcaaaaaataaataaataaagaagtcttggccaggcgcggtggctcacgcctgtaatcccaacactttgggaggccgagacaggcggaccacgaggtcaggagatggagaccatcctggctaacacggtgaaaccctgtctctactaaaaatacagaaaaaaaaaaaaaaaaaaccccggcatggtggcaggtgcctgtagtcccagctactcaggaggctgaggcgggagaatggcgtgaacccaggatgcggagcttgcagtgagtcgagatcgcaccactgcactccagcctgggcaacagagcaagactcttgtctcaaaaaaaaaaaaacaaaacacaggagtcttgaccaccaaatcttcagtatggtggggtgcgggtgcttgggcaagggagggacaacagcaaagggaggttcaaaccgggcagaaagccaccacagcttcagtgtggcaaggagcacatttgaaatgagctcacaaaaggaaggctttggattatattcctggaaagggcagatgtcttggagcagacgggaagagagaaggaactgtggtgatggctcccaaaacaccaagggtttcaggaagaaggcagtgaggtccaagttaaaataagggaagcattctatttatctggggaaactatggcaacagtaggcattgccggcagttcagtgggcaggagcagtgaggagggcaggaacacagggagaaatggtgggaatgcattcagggaagccaaaagcaaaagatagctggcagcatgccaggattcatgttgatgcaagccagcgtctactgagtgcttccgtatgtaccaggcgcccttctaggctcttggcctgcagtaactccagatctggcagctgcaccagggggtgggcattctgattaaccctgactttgcaggtgaagaaacaggctcaaaatagtgtagcgaagctttattataaagtcacacagctctgaaatgatggaaattgggactcaaacatgattgtctcacagcccagtgtcttaatatctgcctcaaagaacactgcccacagcatgcaggcttctttatgttgcaagaacagaaaaccccactggcttaagccacaatgcgcagctgattcaacacccagcaccccacttccaggctaattctaccaagacctggcttgaatgacatcattttctttctcagaaactcttcatgagtcttgctttattgtttagagcaggaaagaaaataaaccacaaaccctcagtagtcatttgtttcaaatgcccagttttacagacgagggcactgatgtgcatggctgtactctgatttgatcaagaccacatggctagttggtggcagagctgggctgaaattctaagcccctagtccaggtccagtgtgtgtccctgtcccaccatcttcagcaagtccactctcttctgcttggctttggagcccagccccatcctgttctccaacacaacttccctctgcatcctgaacacctatgactcactgcgctagagtcaccgtggctcccttggccctgaatgctgctcctggagaggttggaaggaagagcgacacctgaggacaaactcctgtattagtccattctcatgctgctatgaagaaataacatgagactgggtaatttatgaagaaaagaagtttaattaactcatggttctgcgtggttggggaagcctcaggaaactcacaatcatgagggaaggctcctcttcacagggtagcaggagagagaatgagtgccaagcgaagggggaagacccttataaaaccatcacatcggccaggcacagtggctcatgtctgtaatcccagcactttgggaggccgagggggatggattacctgaggtcaggagttcgagacaagcctggccaacatggtgaaaccccatctctactaaaaatacaaaaattagccaggcctggtggcttatgcctgtaatcccagctacttgggaggctgaggcataaggatcgcttgaacccgggaggcagaggttgcagtgagctgagattgcgctactgcactccagcctgggcaatagagcgagattcagtctcaaacaaacaaaaaacaaaaacaaaccatcacatcttgtgagaattcacgatcatgagaacagcatgggggaaactgtccccatgattcaattacctccacctggtcccgcccttgatatgtggggattattacaattcaaggtgagatttggatggggacacagagtcaaaccatatcacctcctgaggcagcctaggtgtctgggggaagttctgagaagctcttcactcctttcctagttccttcagatcagggctgggcaggaggcaaggaaaagagccccagtatgaatagggaatacttcccagagttcaagacctggggcagcactttattttccttcctgtcttgatctcaacctgaggctgtggcccatctgcagcctagactatggagaggagactagggaaggaagagagctgccttgtttatcacctgcttccacctcactgggtgacaggcggcctctttcccctgcattggaagtggcaggagaggagggagctcagaggcaagggtagtgagactctggctggccagaggcactgctgctgaatcccccactctggtagtgggaaggcccggctgaaaggagactccttcttttctccacaggccttggaatgagaagaagggatcacagggagattctgagtggcccagtccatggtagaagctggctggtctgccttcccagcagcggcccagggtgggggaaatggcactgtcccaaccttgcccactcaagtgatcccagaagccaagctgcatacagagtgggtctcacggtctgtcttcaagatgagaggcgacagcagcaaatgcagttgtgccccaatagggactttggtctggtggggagcacgtgggggagtgttggctccacaggacatttaccacacagcttccctttccccaaccttccgtgatgtttgctgagcacctaataggttcccgggactgggtaaggtgctttaaagatactattttaggccaggagaaatggctcatggctgcaatcccagcactttgggaggtcgaggtgggagggatcacttgaggccaagagtttgagaccagcctgggcaacagagcaagatcctatctcttcaaaaaattttaaaaattagccgggtgaggtggtttgcacctgtagtcccaggtactcaggaggctgaggtgggaggactgcttgagcccaggaggttgaggctgcagtgagctatgattgcttcactgcactccagcctgggcaacagagtgagaccctgtctccaaaacaaagaaacaaaaaagagacagagagagagaggtgttattttaatcaatcaactcagccagtcttgcaaggcagatgtcattaccctttttacaggtgaggacagtaaggctcagagagattcaagtacagtccaagaccacataggtcatgcatcctcagctgagttgcggtttgaattcaggtgtgccactcctggcctcttcacctcacgctgctcacttgctcacctcttctactccccagcttttctccctgggttcttgatcacctgaccccttcacacctactatcctgcccaagaatccctctcagcaatgtccaaaaccaggacaccaagccatttagcaaaatgcagtcccagatgctcagcagtctcagcagtcaggatgggttctgggtccctggaaagatcaggcaaggccaggagacccaggcagcccctgtctcctccctgggccttgcttctgaaaggtgaggagaatgctctgtattctcaggtcttcccacttctccttgggactagagctgggggcacttgccaggcttttctctttctgttactgaaaagggaatttcatcagctgtgaacctggggtgagacatgacacattcccaagttgagcctaggttcatcctccaagctgcctggtgatgaaggagcattaccgggcttggggaccatccaatcccacacccaagaggcaaacagctgctcggcatttcctgtgacgctccagtgcccctagaaaaggaaatttcacaagctaggaatgtcctgagcaggctgtctgggacagtatacactgttctgaacctgggggagtagatgattctatggttcttcctgcagaggttttggcaagcatggacttccccatagcagagttttctgtgggagtaagtagccctgcctgcagcaaaggcagcctattgcagatgaagcgtgtcagcagggctcagcgtctgaagggactggggtatgcgacaagactatggctcaacacaaatgcacccagcgtgggggctgccctggcttctggggttggcctcttgagggccttgagcagctggggtccagagacttttagggacttttggtgctgtagcctctctctgggacggccattccccattcctgctgcaatcctcattcactgacttgtttgctaattcattcaacaaacttttatttatttattcattcattttgaggactttacacaaagcctagtgttaggttctaggaacatagtgatgaacaagagccagtctttgcccttaaagagtttgtagaccaataggggagaaagagattaaacagctatctaaaacttaaggcacaacttaaaattgaaagaaacaaagaagcaaaaaacaaacctataatgatacaccctgaaaagtgcttggtagtgatgagaaaggagctaatttctttagggtatgaacaaagattccccggaaaggtgccactcgcattgggtctaaattgttgtgtttcgatattattcgtagagaagtaagtaaatgaggggctgtgggatgggaagaagaggacttttcaggctgtagagacccatagaagcaaatgtacaagcatcttttttttttttttaagacagagtcttgctgtgttgccaggctggagtgcagtggtgtgatctcggctcactgcaacctctgcctcccaggatcaaggaattctcgtgctttggcctctcgagtagctgggaccacaggcacccaccaccacacccagctaattttctgtgttttttttggtagagatgggacttcaccatgttgcccaggctggtcttgaactcctgagcctaagcgatctgcccacctcggcctcccaaagtgctgggattacaggtatgagccactgcgcccggccaagtgtaccaacatctaaaacatgaaccacatgaaactgtcatttttgcaggttgaaaaaaagttcagatatgggcaattttaacctaacatataattgtcttaagatctgctcaaattagggatgcctttcttctctgagttagactgctacattttaattattttaatcacaagaaggaaattccaggacacccaaagtgtccaaagtcttcttgtcctggagcctatgccccacaataacagagcactgagcatagctgactctttggttaccatgagccagctcctgccggctgactgcaggaggcgttttgagaaatcacatgagccgttcaagtctccaggacagcaccaatgcacttgttcttccaggtggacaacagaaggacacccacaactcataactaagttcctgccagcaacagccaggcagctattccaatgcagacgtgttttgaccctttttattgttttccatagggcagaaaatgagagacagaagttacacccatttacaacattctctccttgttaactttttctattttttattagaaacattcaaaaaacgtgctattttatgataagagtaatacatattaaaacatcagaaataatattttttcacctcaggttgggaaaagaaaaggcttaaaggtatctagtaggagtgtaaattggtacattgtctatggagggcaattcggcccacaaccatcaaaattacaacatagggctaggcgcagtagctcatgcctgtaatcccagcactttgggaggccaagaagggcagatcaccggaggtcaggagtttgagaccagcctggccaatatggtgaaaccccatcttcactaaaaataaaaaaaattagccaggtgtagtggcgcatgcctgtaatcccagctacttgggaggctgaggcaggagaatcacttgaacttgggaggcggaggttgtagtgagttgagattgcgctactgcactccagcctgggcgacagagagagactcagtctcgaaaaaaaaattacaatgtagttccttatcttcctcccttactgaactcattcagtcctaaagacagtaagtgagggcacacaagagagttacacattcagaaagagggaacgaccccaaccaaaacaaacagaatgaaccctacaatgccagattggaattggagatattgatgtgaacttgtggttttctatatacataattgatatataaataaatatagaagtattgtgggtttgctgttatacacacagtcacactcatgcacacacacagagaaattccccagctcttcccagaggacttgttagcagtgataccccaacagcagtgagtatacctgtcattcagatctttgctttaaaatagtattttcagccaggtgcggtggctcacgcctataatcccaacactttgggaggccaaggcgggtggatcacttgaggtcaggagtttgagaccagcctggccaacatggggaaacctcatctctactaaaaatacaaaaaaaaaaaaaaaaaaaattacttgagagtggtggcacttgcctataatcccagctacctgggaggctgaggcaagatagtcacttgaacctgggaggtggaggttgcagtgagccgagatggtgccactgcactccaacctgggcgacagaagctccgtctcaaaaaataaataagtaaattaattaattaattaatattgtctgtgaaaaggacccaggctccttggagaaatggctgattccagagctgaggcaggaagactgcgagatgagcctggaacatattgtatcaggaagcaagaaagtgctcaaagaatgatagggacatgcccgaaagactcccactgaaggggcttctactggccacatcagggacattttgagcatcagaataaataatgattataatggattataatccatagaataaaacaaaaccatgaatctatagagataaattttacagtggagacgcccagcagacattgctttcatcagtgggacaaatcaaaatcgtgtaccacctgacaggaggcaccaagtgaacacagcatcacttccatgatattcctacagaatgcaacctacgctaataatggaaaagaaaatgagacagacccaaagtgagtgataattcacaaaataactggcctgtaatcttgaaaatgtcaaggtcatgaaaatcaagggaaaatctgaggaactgttgcagactgaaggagactaaaagacatgaataaaaagaaattaacatatgattctgaactgtgtccttttgccatgaaagatgttagtggggcaaaactcaaacagggtctgaggattcaatggtagtaatgtctcagtgttaacttcttgatttgacagttgtggttatgcgggagaatatccttgccagtgggaaacacacattaaagtattgggaggggattgggaaaagtattctcaaatgcttcaggaaatgatctgtaaatttgtgattgtttctaaacaacattatgtagataatgcactctttgcaatgatatgaaattctttcaccctggaaattgtatgacttagtttgttcctgttgctataacccaataccttagactaagtaatttataaacaatagaaagttatcacttgaacctgggaggtagaggttgcagtgagctgggaaggctggaggctgggaagtcaaagggcagggaacctgcagatttggtgtctggtgagggctgctctctgcttccaagatggcactttctggctgcatcctctcatggtggaagggcgaaagggatgattcctacatcctcacatgggagaagagatggaagggcctaaagaggcctggctactgccctccagcacttcataagggcatgaatcccattctccagggtggaaccctcatgacctaatcaccttccaaaggcctcaccttttaataccatcaacttggggtttaagttccaccatataaattttggagggaggcacacattcaaaccatagcattctacttgcaggaatttttcctagagatatctttgctcatgtgtatataagttactcaatgcagtggtttaataaagcaaagatttgaaaaaaacctaaataatcaccaacatgggctggttaaatacatatgatatatccaaacataaaatgcatacaaaaaaaaaagaataatacagcctggcaccaatctgcagaatacattgtatgaaaaaggccaagtatggaggaatagaagaaataggccaagtatagaataggccaagtatagagatgcaatcatttgtgtacaaaaagagataaacagtgtcaatgtgcttgcttttgtatgcacagaggatctctgtaaatacaccccagacattgagaccactgggtgactctggagagaggttctggtgcttgggagagtgacatgggaggaagaatcttctacacccttctgtacttcagaattttgaagcaagtgcatgtattacctgtttaataaattaattaaactaaaattatatattaaaaagtgaaatgcactgggcacagtggctcatgcctgtaatcccaacaccatgggaggctgaggcaggagaatctcttgaacccaggaattcaagaccagcctgggcaacatggtgagaccctcatctctaccaaaaatttaaaaaattagctggtcatggtggtgcacacctgtggtcccagctacttgggaggctgaggtggaagaattgcttgagcccaggaggttgaggctgcagtgatctgtgtttatgccactgcacttcagtctgggtgacagagatcctgtctcagaacaaaacaaaacaaaatggcatgctacctagacacagaaggaatagaaggaataaattaacaagaaattttaaaaatttatctgatctcttgttacaaattagtaatctgccttctgggacaggtcgcacagctccctgcagggccttgcttaagaacaataaacaattctcattgcctgctattttcatctacttaacccggaaaaataaaattatttgttgggactttcagtattatggatggaattgtgcccccttccccctgttcatatgttggagtgttgaaatcctaactctcagtccctcagaatgtgatcatatttggagatagggtctttaaagagggaattaagttaaaataaggtcactatgatggccctaatgcaatataactggtgtccctacaagaagaggaaatggaagaagatgtgaagacacagggagaagacagccttgtataagccaaggagagttttggaacagattttgc

SEQ ID NO: 3481 - DNA, 5388 bp, Homo sapiens
cagtgacgcgggcgctgcagccgtcgctaccgccgcgttctattctccgaagccggcgaccgccccacctcctccctccctcccgcccgcttcctctgcccacagcgccggccagagcgagctagacaagggcacgcggggcctcgcctagacccgagaagactgcgggcgcgcgcaagcggcggcgtggaagctgtgagcgcccccatcccggaggtctccgccggctcccgggtgaatcagctcccggccgactttaggattcttctggattttaaattttttctttttaaaaaaacttggacggataaaagatgtgccatggcaggatagcaccaaagagcacctcagtgtttgccgtggcctccgtgggacatggagtgttccttccgctagtgatcctttgcaccctgcttggagacggacttgcttccgtgtgccccctaccaccggagccagagaatggtggctacatctgccacccccggccctgcagagaccccctgacagcaggcagtgtcatcgaatacctgtgtgctgaaggctacatgttgaagggcgattacaaatacctgacgtgtaagaatggcgagtggaaaccagccatggagattagctgccgtctcaacgaggataaagacacccacacatcacttggggtccccacgctgtctatagtggcttctactgccagctccgtggcgctcattctcctcctcgtggtgctgtttgtgctgctgcagccaaagctgaagtctttccatcatagcaggcgtgaccagggggtatctggggaccaggtctccatcatggtggatggagtccaggttgcactaccatcatacgaggaggctgtatatggcagttctggtcactgtgtgccacctgctgaccccagagtacagattgtgctgtcagaagggtctgggcccagtgggaggagcgtgccaagggagcaacagctgccggaccaaggggcctgctcctctgcaggtggagaagatgaggccccaggccagtctggactatgtgaagcctggggctctcgggcctcagagactgtgatggtgcatcaggcaaccacctcttcctgggtggccggctcagggaaccgccaactggcacacaaagaaactgcagattcagagaacagtgacatacaaagccttttatccctcacgtcagaggagtacacagatgatattccactgttgaaagaagcatgagggcagcggccagcctttcctctctgcgaggttctctcagcccttcctccctctccctgtgggattgagcaccctgtactctccagccaccttacctggatacctgagctgccacctgtgtatctgtgtatctctgagggccctataggcccaccttgctggaaactcaaggaagattctcgccatctgcctgttggacagctggaggagctggctctttgcctggccccgccttcccatctgtcagagacatatttgaatgtgctggatcaaaccctcccttttcctaagcctctgggtcccctccagccagctctttggcggcagcccccaccagctcctgtgggcctgagtgctgctgtgtttacttgtgcctttcccccaccctgtccagtttccctgtcatgcagacttgttgctgtccacaagccttagtggctgcactgctgccccctgccacacagggggccgggcctgggtctgtcctgtttcctttgagggttgcccctactgccctttgcaggaacagatccaggtgtgagagctcttgagtcaagagtggcagaagtggctctaattggggtgagagtgtagtccctgggcttgccctgggttgaccctggtggcatatttccttggccgaggatggaagatttggagaatcatgtccatgctggcccaggacccagccatctggcccaaaggcacaagctcctggccctgttgagttgagagtttccaagaagcatccagaagatcccaagggagagaaggaaaatggctgataatgattgtcttcctaatatgcaagttctcacttcctacttccagcatcggccttcctggccttgtcttttttttgtttccctggagtataatgggaagttgcatgctgcctcctgggttttatcccagatagctctggctttcttgctgcccacaggggcctggggcaggaaggagacttgctgagatgccatggagtgcccatctggtcactggcagtctgggcaggttgcccctttctgggtttgtggtgacggaggggaggccgagaggcacagaccaagtccccgggtggctgcaggcagctccagcccggtcctgaggatcctcctcaccatggtcacgtgccttagtaactgtgcccaggaagtggcctgctgcttgctgtgctgctgcttttcctacttctgcccttccctgccacccctcgcatgtcacagctgacaagcaattccttgtcttccctggccccctgggggaagggctgagaaacagtccatgtgcaccccaaccttaatggcctgaggtgggcagaggggtgtggagcagcctggagtacagggccctgggggaggagcccactgatgaggggcgctctcccatagccatgtgttgaatgctaactaggctggggtggacgaactctgccaactgctgtcatcttagaagatagatgcagcagtaaggaatgtttgttttgcttttttctgaaattttctgaagcactgtggctgggaaacttcgaagcggaccctgtgctgcatgtctgctcctcccctgagcctgtctgcttgggggtggtaaaaataaaaatcccagtttattttcagtaccttacctaacagggttggctccaggcgtgggtggcctagaagatgaggggagtggtcttctcccagccttttaccctcttgcctcctgcctccgcgcttacacacgcactttaccacccggtcattccctggcctcttgctgccacttgtagtcttccttccttcctctcagggtaagggcagtgcctgctgtgcctgttggccactcccacacttcccctcccccaggagccctcatctgctgtgctgagtccaggaaagcatagttaggtagggagctggttggagaaggtgctagaactagaaggcagatgagactagcatgggcccacctggagggctgtccctaatggccccagtcgccttacctcacccacagcagtgcccttgtcttcctccaaaacagaaagcagtgacaaaagggggaggggtggtaatctgaagtctcactgctgagccttcagcttttatttttcactgtttcaaaacccgcattctattctagaatggtttttaaaatggaagatcttacctttttctatcttgttactctggggttttgtccccctaagagattgcactttttgtttggggtttattcagctgcatagatgaccagcttgatccctggtgaaatgaaaagccttccttctcctgaagcctctttccgccctgccctccactaacaacactgaggagcacaagcccaggcttgcccacctggtaggaaaggaagaaattagaacaatgggagccttggctcccctctcgtctcctcccctccttcttgtcactggctttgatgaggcccacttcccagaggctcctgggcctgtgagtgcaggagctcattctcccctcactgctgaagtctgtgacagcttcttcctccagttatgtctttcttccaaagcaatttcttaaccatcagccatgtgctgctatttctagggcttctgggctttgtcccttactgagagattagggactccacagctgccttgaggtagggcctggctgagagacaagggtagcagcaggtggcaggctgttaaaagacaggctgcctgaggagcctggagcaggtggaaacaggtggaagaaaccggccacagccctgctttaccgggctcacctctagggcattccagcaagaggctgatgcaggagaatggccagcaccaaaggacatttaaaagagtttttgggtttttttgtttgtttgttgttggtgtttgtttttttttttttttttttggcacacttgagctgactcagtgcaggtttaatatcctggtgacttgcagtcacattctaatgactttcaagggccagaatatggtgaaaatcacttaaaatatccgtcccttccatgccttagtttagcaggtaggctctatcttttgccatttctgtattttatgtgctgtgttcccgtttcactgggtatgaactgtgaaatggactgaatcctggccactttatgagtttgtttggttttataaggcatttcaatgtacattctataaatacaagcactccatttgcaaacagatcttaagctaatattttctttcccattcatcttgccctccccctcctcccgccagctttaaagttcagtggagaagccagatggcaattcagacaaaggtatactcttcctgcttcatgggtggtggcacgggaatagatagcccttagccctttccctcccagtcccagctgagccctcagaccacttgcttcccacataacaatgtcgcctccatttccgaggaacatccttgcgtagagaatgaaatatgctgcaatcatttctgcatccttactcctcacccccaaagaaaaaaaaaaggcctagcagggaagcagcatgcaggcttcacagcttaatgccaaggacagcgagtgaggctgggagcttctcttgggcctgctgggtctgtcagctctcggaatagggacagtccttactggtgccccaaggtgggacttggagaatattttgcttggcatatgtttggtctgaatggtgtagttgctggttccctagagaggaaaaggtggcaggcccagctttgctgggaaatggctcttaatttccagttgaaaccctagtagaattgtgaatgaaaacctcaaggttgagcccctctgccaagcagcagagctagtagaaggggatgcaggggcaaagcactcagttgccaagcaaggaggagagatgtacgtgggctgtgtggcagtccccacaccctgccctggcttcttcaggttatcgcaccactatggaatcctttgcagaatggtactcatataatggtttaaaacaacacattcataattgactctgtgcaggatgtcactcaatcagtttgggtttgctttattttattttatatatatattttttggtatcctgtacattgcagtgggtgtgaagatagtattttaatatttgtacaaagtttaatttaattttaattgttctatgtatataactgcatttctaaataattaaaaaaaagttcttatgaagg

SEQ ID NO: 3482 - protein, 299 aa, Homo sapiens
MCHGRIAPKSTSVFAVASVGHGVFLPLVILCTLLGDGLASVCPLPPEPENGGYICHPRPCRDPLTAGSVIEYLCAEGYMLKGDYKYLTCKNGEWKPAMEISCRLNEDKDTHTSLGVPTLSIVASTASSVILLLVVLFVLLQPKLKSFHHSRRDQGVSGDQVSIMVDGVQVPSYEEAVYGSSGHCVPPADPRVQIVLSEGSGPSGRSVPREQQLPDQGACSSAGGEDEAPGQSGLCEAWGSRASETVMVHQATTSSWVAGSGNRQLAHKETADSENSDIQSLLSLTSEEYTDDIPLLKEA

SEQ ID NO: 3483 - DNA, 35937 bp, Mus musculus
  misc_feature (1)...(35987): n = A, C, G, or T/U
tttgttcttctagagagtctgagctgagtgtggcggtgcatgcctttaatcccagcactcgggaggcagaggcaggtggatttctgagtttaaggccagcctggtctacaaagtgagttccaggacagccagggctatacagagaaaccctgtcttgaaaaacaaaacaaacaaaacaaacaaaacaaaaaacaaaaaaaggagagagagagtctgagtgtgttttcagctcccacagggcaattcacagcaatctataactccagatccggcccctttggacttccaagcatttacatgatgcatatacaaatgttcaggcaaaatgctcacatagataaaaataaaataacttcatctaagatatgttttaaatggccacagtgtgattcttgacgtgtgtctaacagctattgcaccagtcaccttctcgctcagacttctgatgcagggacaccagccagaatgtactgaggaccctaaagtggcccaagaggaaggcgctcaaggagagttattggcactcctgccaataactaagattcttagtgtatgcaggctccagtccttctactaccccatctgtgcctctccttgtaaaatccagtcttagaaaagagctctaagaagtcagtttgtcaagaataccctattcccagtgtagactaactgagctacttaccctcccccgactccctatgcactcactgtccaccctgaccccaggagtctgatcaatatggcaagatgtgtctgtagcaagattcctgctaggtcagttgaacagaatgcccttatccctcatttgtcctcttagtcattttctgtcccagaggcccttggctctaagatctcacttatccgtgttgcatttagagttgccccatctttgttccccaatataagactctgttgctatcacagtggtcttaaatgaggtcttcctcattaatctgtaccaaatatgtctgccatgatttttgttgttgttgttgattcggttggttgctgttttgtttagacacaatctcatgtagcctaggctggccccagctttacacctggaagaaacagaaggatcagaagtgcaaggtcatctttcggtactgtgctcaaggccagcctagatggactactagataccctgtctcaatttaaaaaataaaaaatgcaagccagtgctggacaaacctgactccttttattccttcctcaccacacacaggtcccatgtggagagcacagcccttccttcctaccacctccgtctgctgctctctcctgtctagtctgtcacctttaagtgaccctttgtttacctactgcataaagctccagataggccatccagaatccacctgagaagttcccatcctggcacctctgcacctgctgctcttatgcctagcaatggcctcccttggccatgcctgcctctctttccctctgcccagatgtcccaccagattcctgccattcagtgtcctgaactttcctctcaacttgtcctgaacttgttccctctcagacccgctgaccattcctgactacacatgtctctttctggtaacaacaacctctctgttctttgctggtgccctggtcctcctgtctatgtgaattctccctgtctgttgtggagtccatgtgtcccaagccagccatgtgtggtggctcctaactgtaatcccaaaacgcaggagactatgaggatcaagaggaggctagcctggcctacactgtgagttccaggcaagtctggactatatggtgagaatctcttttgtaaagagaaggtagccagagagatggatctgtggttaagaaaacttgctgggttcagttcctagcacccacatgatgatcaagcatctataactccagttccaaaggatcctatgtcctcttctggcctccctggtaccaggcacacacatggtacacatatgtgcatgaaagaaagagggacccatacatgtaaataaatctcttgggctggagagatggctcagcagttaagagcactgactgctcttccagaggtcccgagttcaaacctcagcaaccacatggtggctcataaccatctgtaatgagatctgatgacttcttctggggtatctgaagacagctacaatgtacttagatatattaataaataaatctgggctggagagatggctcagaggttaagagcaccgactgctcttccagaggtcctgagttcaattcccagcaaccacatggtggctcacaaccatctgtaatgggatctgataccctcttctggtgtgtctgaagagagtgagagtgtactcacatatataaaataaataaatcttaaaaaagaaaaaataaggagaaaccctgtctcggaaaaccaaaataaataaataaataaataaatctttaaaaaaataaataaatctcttttgtttagtatttgttttggttttggggggatagtgtctcaccatgtaaccgtgactgtcctggaactcattatgtagatctaccagactagcctggagctttcagagatccttttgtctctgcctcccaaattccaggctctaaggcatgtgccactacacctggataaatcgtcaaaagtaaatacatacatacatacatacatacatacatacatacatacatacaggagaggtagcaagatggttcagaagttaagttaaggcactgacttcccagcctgatgacgtgagtttgacccccagaacctacttaaaggtgggagcagagaaccgactccacagagcgctcttctggcctccacacatctgctctgtggagcacaagtcccccaataataatagatttaatttaatttattaaggaatatctgtctctctcttggggctattgtgatttacttagaaatgagcataagcataaaccccaagcatggaaccatttgggtcctgtgctgggactaattaagactctcaggggagctgtaaatgtggaagcctagagcggcttgggagagctgcctttaaagaaaacaaaatttaccgccccacctctttctgttttgtttggattttgatcttttttatttttttaaataagcctgactgatttgaactcagtatgtatagcaagctggcctcaaacttgtgggagaccccacttccattctgcctcctatatactgggactacaaacctgtaccacctcacgcagcctaccatatagacaaggctgaccctacaggatcacagcctgggccactgtgttgctccttgaagtcttttcaagtcgctcttggtcataagaagcccgtctccatttctgggtgaccgttgagactaaagtgcctgtgtcacattgaacatgctttgctgagcatagaccttgtgccagcatctgtctcaggcctctcacactgtcacagtggatcattatgaaagcatcagacttcacagaaagtaaaggaggcttggaaatagtcccccatggccacatagttgattttcagatgcagcctttaaacagccatccatggggctggagagagagagctcagtggttaagagcacttcagaggtcctgagttaattcccagcaaccatgtagcagctcacagccatctattatgtgatctgatgccctagcactcatataaataaatattttttgttgtttgtttttaaagatttttttttcatacacagtgttctgcctgcatatatgcccgcatgacagaagaggacatcagacctcattacagatggttgtgagccattatgnnnnnnnnnnnnnnnnnnnnnnnnnnnnnnnnnnnnnnnnnnnnnnnnnnnnnnnnnnnnnnnnnnnnnnnnnnnnnnnnnnnnnnnnnnnnnnnnnnnnnnnnnnnnnnnnnnnnnnnnnnnnnnnnnnnnnnnnnnnnnnnnnnnnnnnnnnnnnnnnnnnnnnnnnnnnnnnnnnnnnnnnnnnnnnnnnnnnnnnnnnnnnnnnnnnnnnnnnnnnnnnnnnnnnnnnnnnnnnnnnnnnnnnnnnnnnnnnnnnnnnnnnnnnnnnnnnnntataactggcccctctattctgatcggtgcaccagacctcctgatgccagtaagaggagtggcgggagaatgctcagtggttaagagcactgactgctcttccagaggtcctgagttcaattcccagcaaccacatggtggctcacaaccatccgtaatgagatctgatgccctcttttggtgtgtctgaagatagctacggtatacttatatataaaataaataatttaagaaagaaaggaaggaaggaaggaagaaggaaggaaggaaggaaggaaagaaagaaagaaagaaagaaagaagaaagagagagagagagaaagaaagaaagaaagaaaggaaggaaggaaggaaggaaggaaggaaagaaagaaagaaagaaagaaagaaagaaagaaagaaagaaagaaagaaagaaaggggttggggatttagctcagtggtagagcgcttgcctaccaagtacaaggccctgggttcagtcctcagctccggaaaaagaaaaagaaaaaagaaaaagaaaaagaaagagagttcggaaactaggattgatgccacgtgtctttaatctcagtattccagagacagaggcaggatgattgctacaggccatccagatctacctagcaaatttcaggctaaccaggccctcatagtgaaactgtctcaaaagtagacaaataacaatgacagaaagaagcttaaaaagaaaagtaaagtaataaaaatcccttaactctgaacattggtctcacatacacacacacatacacacacacacacacatatacacacacacacacacatatacacacacacacacacatatatatacacacacacacatacacacacacacatatatatatacacacacacacatacacacacacatatatataccacacacacacacacacatatatatacacacacacatatatatatacacacacacatatatatacacacacacacatatatatacacacatacacacacacatatatacacacacacagatatatatataaacacacacatacacacacacacatatatatatacacacatatacacacacacatatatacacacatacacacacacatatatatatatacacacacatatatatacacacacatacacacacatatatatacatatatacacatatatgtatgtatgtatgtgtgtatatatatatgtgtgtgtgtgtgtgtgtgtgtgtgtatgagtcactctatgtcctcttctttatgtgtacagtatgggccatgcctatcagtgcagcaaatgcatgccgtgccctgggaggccagaagagagctgttagccgccatgtggatgctggggcctgatcctgctcctcttcaagagcagccaatacgattaagccatgagccgtctccagcgctgccctgcgtagtctttctgcaacgcttcactcactcaaagaaatatatatggtcttcggccatgactcattatcattattgtgtgaacgttttgaacgaatatgcgtgaatctgtatggtacagcctatggcatccctatgctacatgttacatgtatgtggtacatgtaactcttagaccacaaacctatgtagcatattattgaactgaatcctgtagacaattctaacacaatgttgcttgtgtctccaaacatactgatgcacagtgaaggaacagtgaagtactcgccattcgacttttctctccactataatcttatgaagccaccattgagtacgtggtctatggttaactaaaacatcttagtataacatgggactgtactttaaaccctctcaaaataaaaaaaaaattgcttaaaaagagagaaatgaaacaaagaagaaagatgaggcctaggtcaaaggatgggatcagaactgaggccagagaactgaggctggagtggggcccaggcaggagctgggctggctcagtggcagctcttccacacagagcccagtgtttcccgagccaggctttgggccaagagcaatatcactggcaccagacagcctctgcccttgccccccaatagctgtacccccagaaagtcggggataggtgaggactggcctccagagaccttcctcccgctgcatgacactgagggacagcgtctgtaaagttctgcccatggcttggtgtgccacagggagagaaacttctcccccagctcccacattccttgtcttccggcaacttctagtgagtctccaccttctaggaaaggtcgcaagccgggaagccagtgtggtgactcacacctgtaattcatgcacttggcctgaggaaagagagttactaaaagttcaaggccagcctgagctacatagtgcatttcagaacaactcagtgggtggtatatatagccagatattgtctcaaaagaaaaagaggagggnnnnnnnnnnnnnnnnnnnnnnnnnnnnnnnnnnnnnnnnnnnnnnnnnnnnnnnnnnnnnnnnnnnnnnnnnnnnnnnnnnnnnnnnnnnnnnnnnnnnnnnnnnnnnnnnnnnnnnnnnnnnnnnnnnnnnnnnnnnnnnnnnnnnnnnnnnnnnnnnnnnnnnnnnnnnnnnnnnnnnnnnnnnnnnnnnnnnnnnnnnnnnnnnnnnnnnnnnnnnnnnnnnnnnnnnnnnnnnnnnnnnnnnnggagggagagagagaaagagagagagagagagagagagagagagagagaaagaaagaaagaaagaaagaaagaaagaaagaaagaaagaaagaaggtataagattcagagctggagagaccactcagtggttaagagcactgactgctcttccagaggtcctgagttcaaatcccagcaaccacatggtagctcacaaccatctgtaatgggatccgatgccctcttctggtgtgtctgaagacagctacagtgtgctcatcatgtatacataataaataaataaaatctttttttaaaaaggagagagaaatataagggactgaggataatgtccttccctctccccaccccctgccactccctcttcctgtctccttccctacagtaagtaatcttacttatctacccagaggtggcgtctgctgtacagccttacccatggaatttaaattagttcatgaagtcagggtgtggcggctcacacctcccagcactggacaagagggaacacaggaagctgagtgacctagaagtgaaccaggtcccacagaacggggcacagtcacataataaaccttcaataaaatacttgccagtcaatttactgactgactgactgactgactgactgactgaaagatcctgtgagagtgtgaaaccgttcagtcaagagatttagagagtatatgtttggaacgggggtgggggggtgacagtctgagggccttgggaaccttggaagacagtggggttacaggaagttcttagttaattagcaagggctcaggatacacctcaggattggaatgaaatctgtgttgtagggtctagctcctgttgtcagctcatcaaggaccccaagaactgaatttaataagtggagtccgtggaggaccgggagaagagaggtcctggcattctgaggtgagctctctgcaaagcaggtcctccagctagacacctccttcctcctggacacttttgaggggctagactgttgactggtggatcacgtggatcatgctagactttttttttctctccccggaccctgagtgtatacatgcacgcatgtgtgtgtgtgtgtgtgtgcatgcatgtgtttggcacccatatggtgactcacaaccatccataactctagttccagtggatccaagatcttcgggtttccaaaccatcactgcatgcagtacgtgcacacagccatacgtgcacacagaataatgaaattaaagtgtaaataaggttaaaagtcaagatatgaatagaggaaggggagaattggtttagagcatgctgtttcttccaagagtccacannnnnnnnnnnnnnnnnnnnnnnnnnnnnnnnnnnnnnnnnnnnnnnnnnnnnnnnnnnnnnnnnnnnnnnnnnnnnnnnnnnnnnnnnnnnnnnnnnnnnnnnnnnnnnnnnnnnnnnnnnnnnnnnnnnnnnnnnnnnnnnnnnnnnnnnnnnnnnnnnnnnnnnnnnnnnnnnnnnnnnnnnnnnnnnnnnnnnnnnnnnnnnnnnnnnnnnnnnnnnnnnnnnnnnnnnnnnnnnnnnnnnnnnnnnnnnnnnnnnnnnnnnnnnnnnnnnnnnnnngctggcctcgaactcagaaatctgcctgactctgcctcccgagtgctgggattaaaggcgtgtgccaccatgccccactgatttttttttttttttttgaaggaaaggaagctgctgcttcccaggcaggctctcatccctgagtgatagctaggagctctgcagatggcctgagttgagctttttttttttccaaaacgcttcatagaggcaaacatcttgggacttcaggtgaaatttggcctggctgacttcatagctaagctacagtccattcgattgacagaagtgctggtagatgagatacacctgagccaggtgggggtggagctctctggaggcacctgctgtgtgccaggcacttgagatacaaaagtgaagtccactgactcagttcctggcttccgggagcttagtggtcggtccccagctgattacatgaataacaactatgcagttacagcctgccaagtgcgaagaagaaagaatggctgttagtgctcacaggtcagatatgaacatgtgaattctccttccagcaagtctcttcagcagcctactatcatttactgatttgctgaggagcaaacaaagacagagacaaggctgatagacagtactgagattcagggctcattcttttctccatcctaacaaaggggacttggcaaatccccagggatgtcctggggccttgaacggagaccaaagtgccagaccaatagagagcaggttagactaggaacaggggatgggtgagcaaagacccagggataggatggggagcaacacaggaggaggaggtctgtacatgtggaccagaccaccatgtcatcacaacactatctatgtaaaaaccagaggaagtattcttttaaagcattatttattttatgtatgtgagtccactgtagctgctctcagacacagcagaagaaggcatcggatcccattacagatggttgtgagccaccatgtggttgctgggaattgaactcaggacctctggaagagcagtcagggcggggcagtggtggcacacgcctttaatcccagcacttgggaagcagaggcaggcaaacttctgagtttaaggccagcctggtctacaaagtgagttccaggacagccagggctatacagagaaaccctgtcttgaaaaaacaaaaacaaaaacaaaaaccccaaacaaacaaaaagaaacaacaaaaaaactttttagagtgaaaatttaaacttttaaaaataaaagcacaactttttacaaattaaagtttaaagttttttcctctctctctttctctctctctctctctccctccctcccccccccccccctcttttccgagactgtgtttctctgtatagctctggctgttctagaactcactctgtagaccaggctggcctcgaactcagaaacccacctgcctctgcctccccagtgcgccgccgccaccccgaccgaccgagatatattttaaatatcctctgaaggtcgctcaggccaaggagaggtcaggtctctctgatgttctgtgatttcacggaaaaccagagagcctggtgagtgccaaattgaggaagagcaaaggatagagcaaggtagcaagttagaccttgcaggttggacgtggggccccggaacgactgagactgggcgatccagtcccaacggggagctcccgcactagggtaccgggctgacatttgccgggtctcggaccacgcctctcagatcagaagtggtccaggaggggcggagtccgaggtgggcggggcaggagggggcagccccccgccacgctgcagttgcagggacattcctggctcttcggcccggggcggaggagctccgggcgggtgagtgtgccagccctgccgggatcgtgacccgcgcgcgcgggagccgggcggcggaggagccaggtgagccgggcccctgcgccgggagcggagccctctagctctgggccagttgggccacacaccgtactcccggccgccgtggggacagcggccgtggagctcccgagctgccccctctgtcccggggaccttggcgcccgcgcggcgggagtggttgggtggagggggcggtaaatcagtaacccgcagcgcacacagggccttttgtccccctccgttcaaagagcaccctggtcaccgctctggttacttattgcccaccggggcgggggcgatgggccagctgtctatgcaactccgcacggggaccgctgacgtgcacctccctccaagagcgacggggtgggggcattaaagtaagagcactgtcgcccctggcaaaaaaaaaaaaaaaaaaaaagtaatgctcgcagtcgcttgcacagagtacctcatcgcgtgagtgcaggagggtgaacaacttagcgctctctgatgacagtcccaagtgctagcgatcctaaggggccagccttggtgaccagactaagaattctgtggttgtgagttcagggtaacctgtgagtgggaataaaacctccccggacctgtccgccccaacccaagctggagatgaagcatggccctctctgctttgcagggtgtggtaggagtcttttgcagatgggccgagcaaactagtgggtaggggacagatcaaggttttaaggcaatagaggaacacggaggtacaggcaagggagcaaacatgtcggcgtttagaatttactgaagggacagactgtgggagttacaaggttgacactggcatttaaaatgaagcgtagaaaagctgggcccagcacatgggccttgatgggtagtactagccaggctgaggcaggagcctcaccatttgtagacctgcttggtttgcagagtgagtttcaatgccagtcttcctggtcaactttagtgagaacttgtctcaaaataatagaaaaagaaacaggagggtcctgcagttaacccttaggggcttgtaatctgggtgacagggagaaaaaacaaaatcaaaacaaaaaaactagtgggcagtgaagaaccaaggtttgccaagataccaagcgagaaatgaccatgacctagtctctgtggggcaggggagctgagagacattgaggtcagtagactgattaggcctgagtcttcctcagcagtgggctgagaaaaaccctcggcagggttcccagtttggtaaagtatggaatgcatcttctaagaatcatgctgttttcttcaactgtcactcactaacattggcctgatacggagattagcatggcccctgtgcaaagatggcgcgcacactcacaagagcagggccccaaagaaaaagaacactgatccaaagatgctggtgacacctggctgttatccaggactaggtaacagcctgtgcgtccctgggactccactggttccctggtcaagttaaggcttaggtctgagtcttccttttgtgaaacagatgctccactacagcatgtggacaagtctgtgtatcagacttaaactccatatcagaagcagagactgagtcatgtcagacaaacggtgccggtgcacactcagtatggggactgggagaatgtctcaccgatgccctgtgtgtgccatccctccatatatggtccctttttgtccctgaagcaaccctatgatgataacaattcagaaagggacaaaggtaggtaggtcttggcaggaatcaggatttgaatttgtcgctaccagacatgtaaaacctgtgccaattacagagccagctagacaggaagctcaatggcagaggctttgcttagcatgcaaggaggtcctgggttcaacccacaactctgaaaaacaataaacaaagccaaacaagctcctacgctgtctaagatgaagctgtgagggaacaaaccaccagaagtgtcctcaggatgcttgtccggctcggaacgaggaagaatgtccttgatttggactgcgcctcgtgacagcacacaccgctggaagcgtcccaaactgggcatggaagtgttggtgacgctaacgagtgaggtcccgttagacggtgtccagatgccgaaggctggccttgtttttgggttgcccttctcttctttgagccttcagcaatgaattcatttattcagcagaaaaataaatgatgtgcaaaggataagtcaccatctctgcttccttccaagaaaagaatcctgaaacttctctctctgtgaaggcatgccaggtcacagtaggatccaaggcagcaggaagtccgcacatgccctgcagaacctccttaagggaggctgtggctctgcccagcagtgttggcttcagcttctgccttgtggagtttggatgagcctgctgactgcttcctgtctctgggtcttcatctgcaaaacaaagaatgggacctgcacatgaccatgaccggagctcttcccccccccccccaatctccctctgttttaggaaggtggtcagtgggaagtctggccctgatcctgagatcagctggaaggaaatgtggctgctcttggccctgttgagcatctttcaggggacaccagctttgtcccttgaggcctctgaggaaatggagcagggtatggcctctaaggtgggagagggtggcagggatgtcagggaatggcaccagaagctggagaggatcctggcccttggccccaagaaggaggcagcggggcagggcgatgcgattcactgtttccctctcggcaagcacacacctatctgtatgtctacaagagaggattagccttacagggcacagagcctgggctaggctgcagagccagtggtgagccccttggctgtgtatgtatgtgtgtggttctatgcactgggtgtgttggttgggaggggcaagcagcatgtgtgatgtatgaaccaagtatagtgggcctcagaggtgtggcatgtgtcctgtatgtggcacctgtagcatgtgccttgtgtgtatatgtgtgtatatcttgggtaatggcatgtctagcatgtgtgccaagtgtgtgtgtggtgtgtgtgtgtgtgtgtgtgtgtgtgtgtnnnnnnnnnnnnnnnnnnnnnnnnnnnnnnnnnnnnnnnnnnnnnnnnnnnnnnnnnnnnnnnnnnnnnnnnnnnnnnnnnnnnnnnnnnnnnnnnnnnnnnnnnnnnnnnnnnnnnnnnnnnnnnnnntgttgtgtcccgtgtgtgtagcatgttctctgtgtgcggggtgggggtggggggcactagcctccgatggagctatgggtatcaatgactcctgccatctgccctcagagccctgcctagccccaatcctggagcagcaagagcaggtgttgacggtggccctggggcagcctgtgaggctgtgctgtgggcgcaccgagcgtggtcgtcactggtacaaagagggcagccgcctagcatctgctgggcgagtacggggttggagaggccgcctggagatcgccagcttccttcctgaggatgctggccgatacctctgcctggcccgtggctccatgaccgtcgtacacaatcttacgttgcttatggatggtaagagggtctgggcagggctttaagggtcccttgggagagaaacccctcttctcttggatttcagatgccttcctttgtccctgaatagactccttaacctccatcagtaatgatgaagaccccaagacactcagcagctcctcgagtggtcatgtctacccacagcaaggtcggtgcctcctcccaaggactcttctccacctggtcactgaggagagacttgtgtgggagccgagctcaccttagggtcctaattgctctttctttcctctctagcaccctactggacacacccccaacgcatggagaagaaactgcatgcagtgcctgccgggaatactgtcaaattccgctgtccagctgcagggaaccccatgcctaccatccactggctcaaggatggacaggccttccacggggagaatcgtattggaggcattcgggtgagtctggactacccaagtccatcttctccaccattttcatttttccccacatagcccctcacataggtggatagatgacgaggaatgtaattccagagccccagagcatggacatctctggctcaagttcttcttacaaagtgcaacttcccagcctcagcagaaactaactcctgttatgttctggtaggggttttcattgttggcaatgaacgtttatggcccaggggcactaaaggattattttaattatttttatttatgtgtaagtaagtaccatacacatgtgtgcatctgatccccaggagctagaattacataggcagttgtgagttgcctgatgtgggagctgggaaccaagctcaggtcctctagaagagcagcgagcgctcttaaccactgagcatctctccagccctgatgatgggggtcctctctctatgtaaccctgatggtcctggaactcactatgtagacttggctggccttgaactcacaaggaactaacctgcctccactctgacttccaagtgcttggactaagggcatctggggtgatgattatttttattttttaagatagatatatagatagatatagatatagatgtagatgtagatgtagatgtagatgtagatgtagatgtagatgtagatatagatatagatatagatatagatatagatatagatatagatatagatatagatatagatatagatatagatgccgggcagtggtgacacacacctttaatcccagcacttaggaggcagaggcaggtggatttctgaattcaaggctagcctggtctacagagtgagttccaggacagccagggcttgaaaacaaacaaacaaacaaacaaacaaacaacaacaacaaatatatatataccataactgtcttcagacacaccagaagagggcatcagatcccattacagatggttgtgaggtaactgctgggaattgaactcggaacctctgatgctcttaaccgctgagccatctctccagcccccatgatgctggtttctgacacaggatcagagtacaggctatctccaaccccaacctcctgggtagcatctcctttaaggtgaggagaaacactgagctactagggtttagcttgctgtcaggaggaaactgagactcagagccagtaaagactacatagggagcagtcctgggtaggggatagctgaacttgaaagactcaatccagggcttagacgttgtttttggtttgttttttgtttttttttttgggggggggttgtggtgtttgttttgcttgttcttttgacccaggatctcattgtgtagtcttgagtggtttgaaactccatctgtagaccaagctggccttgaattcatgtcctcttgcctttggctggcttccaagtgttgtgattaagatgtacaccaccatnnnnnnnnnnnnnnnnnnnnnnnnnnnnnnnnnnnnnnnnnnnnnnnnnnnnnnnnnnnnnnnnnnnnnnnnnnnnnnnnnnnnnnnnnnnnnnnnnnnnnnnnnnnnnnnnnnnnnnnnnnnnnnnnnnnnnnnnnnnnnnnnnnnnnnnnnnnnnnnnnnnnnnnnnnnnnnnnnnnnnnnnnnnnnnnnnnnnnnnnnnnnnnnnnnnnnnnnnnnnnnnnnnnnnnnnnnnnnnnnnnnnnnnnnnnnnnnnnnnnnnnnnnnnnnnnnnnnnnnnnnnnnnnnnnnnnnnnnnnnnnnnnnnnnnnnnnnnnnnnnnnnnnnnnnnnnnnnnnnnnnnnnnnnnnnnnnnnnnnnnnnnnnnnnnnnnnnnnnnnnnnnnnnnnnnnnnnnnnnnnnnnnnnnnnnnnnnnnnnnnnnnnnnnnnnnnnnnnnnnnnnnnnnnnnnnnnnnnnnnnntgtgaatattttgtctgcatgtatatatgtgtgctgtgcacatgctcagtgcctgcagaggccagaagagagtgtcagattccctaggaactggagtcacacctggttgtgagccactaccatgtatttgctgggaatcaaatctggggcctctggaagagcgtcagtcttcttaactcctaaacaatgcctccagcccaacagagacacttcttacagcctctttctctgttcaggagtctctggctttggcctaatcctctcaggggctaggaagattgggaagagccccatagacagattctgacctctccttgtcctggctttactgggtcccctatgaacatttcctctactcctgcctgcttccagctgcgccaccaacactggagcctggtgatggaaagtgtggtaccctcggaccgtggcacatacacatgccttgtggagaactctctgggtagcattcgctacagctatctcctggatgtgctgggtgagtggatgggctgggcaggtaggacaaagaatttggcttatcttcagctcggtcagtcctgcaagggtgggtatcttgtgttggaaactagacgaagtcagtttcagatgagcaaaataagcccaagggtcagcaggaagcaacggggtgggggtgggctgaaggagcagaagtctgccatagggaacgggagaagggggtccaggcagatggcaaaggctgaattcagctctttagaatgtagtgcaggggctggtgagatggctcagtggttaagagcactgactgctcttccgaaggccctgagttcaaatcccagcaaccacatggtggctcacaaccacctgtaatgagatctgacgcacttttctggtgtgtctgaagacagctacagtgtgcttacatataataataaataaaccttttataaaaaaaaaagaatgtagtgcatttgtgggcagtatatgccatgggtgcaacatttgtggggctaggggacagggtgtggacattctgaagtgaatcctagcccaaagacagtaaagccataaaaccttaaaggaaggtaaacagaagatagacaagatctgagctgtgtgttcagaagtccttcccctgatctaggagcggggctgggggcaggtaaactgggtgatttcgtgggtgccactggtcagggttgacggcctggcccggcccccagagcggtccccgcaccggcccatcctgcaggcggggctcccagccaacaccacagctgtggttggcagcgatgtggagctactctgcaaggtgtacagcgacgcccagccccacatacagtggctgaaacacgtcgtcatcaacggcagcagcttcggcgccgacggtttcccctacgtacaagtcctgaaggtgagcttcctgctagcgcccaggccccggggtggggggggggggggcatcctttcccattagggtgggatagtacccaactaccctcccagctgtagtgtggcccagagtctcccgtgacctagtgtgtccgctgcttcagacaacagacatcaatagctcggaggtagaggtcttgtatctgaggaacgtgtccgctgaggatgcaggagagtatacctgtctggcgggcaactccatcggcctttcctaccagtcagcgtggctcacggtgctgccaggtgagggccctgctgaggaagagggggtcggggaggggggaggtcctgggcgagactacaggactcctctctggtccattgaggcctgtaaggtaggcagtttccttggccagtggggtatacagtttgtcctttggcactgtgaatgctctcactgaattcagcagggatatgtatttaatttaacgagactgtccatgtgacccgtgggaatataagactatatatataactgcgatttttcttttttaaagatttatttattttatgtatgtgagtacatgtactgtagctgtacagatggttgtgagccttcatgtggttgttgggaattgagtttaggacctctgctctctctggtcaaccccactcgctcaggtgggtcccactgactccagcacagaaatttatttatttattagtattatatataagtacactgtagctgtctttagacgccctagaagagggcatcagatctcattacagatggttgtgagccaccatgtggtttctgggatttgaactcaggaccttcagaagaacagtcagtgctcttacccctgagccatctctccagcccgtaactgtgactttttcagtgtgtgtccttatatgtgttagtaactatggggacctaggctgggggcggggggaaggggagggctggtcaatctgaccaccgactgactgctcgttttctctgtctatgttcatctaacgagcagaggaagacctcacgtggacaacagcaacccctgaggccagatacacagatatcatcctgtatgtatcaggctcactggttctgcttgtgctcctgctgctggccggggtgtatcatcggcaagtcatccgtggccactactctcgccagcctgtcactatacaaaagctgtcccgtttccctttggcccgacaggtactgtgcctgttccccagcccccacccactgtacggctctcagcctgaccccagcaggcagaacgaatctctcactttgcagttctctttggagtcgaggtcctctggcaagtcaagtttgtccctggtgcgaggtgtccgtctctcctccagcggcccgcccttgctcacgggccttgtgaatctagacctgcctctcgatccgctttgggaattcccccgggacaggtacactgaggaggctaggactgagggtgccagctcaggagtggtacccacagtctgaggcacgggtcttcttggcctctaggttggtgctcggaaagcccctgggtgagggctgctttgggcaagtggttcgtgcagaggcctttggtatggatccctcccggcccgaccaaaccagcaccgtggctgtgaagatgctgaaaggtacacatggcaacctgggcaaggtgtgctggggccacgcaaggggtttacacggactgcccgtgctggggccacgcagtgggctatagggatagccggtgctagggccacacaaggggctacacagactgcccatgctgggaccacacaaggggctacacggactacatgtgctagggccacgcagcaggctgtagggatagcccatgctggggccacgcaagaggctatacatgagaaaggccccaggttttccacccttgggcctgaagcccaaccctgttgctggccctggcgagtgacttccaagcctcagtttcctgttgggcctccgtggggatgactaaagaccccttacttcttagggtcgaagtttatagatgtttctgataaaccgtggcttagtaaatttttggtgtagggtttgaaactggctttcttttctttcattctttcttttttgtttggaattttacttttgtttgtttgtttgtttgtttttgtttttgtttttgtttttgttttttgagacaagagtttctctgactgtcctagaactaactcactctgtagatcagaccagcctctgcttcccaagtgctgagattaaaggcatgccccaccatgcccggatgggaccgttttgttctgttttgaggctgacctagaggtcactctgtaatctagccctgcctggaactcacagcgattctcctacaccagcctctcgagtactggaattacacctgactggctcagtaaagtttagccactgggtgatgatccctatgagatttgtggtgatcgcagcttaatatccctcccctgttagctctccgcatttatcaccttatcatcctccacattgagtgcctcacccccatcaaatccactaaacaatacaccttcaacacacattcctcccagtccttagtagagaacagtcccagtctcagggctggagagatggcttagccaatgagagtgctccatgctcttgcagcggactcaagttcaattcccagcaccaacatctgacaactcaaaaccacctgtaactccagctccagagattctgatatcctcttctggcttctgaaggcactatacacacacacacacacacacatacacacacacacacacacacacacatacgagagagagagagagagagagagagagagagagagagagagagagagagagagagaaatacaaaaataaatcttaaaaataaaaagtcccaggttcaagctgggtctggtggcacagcctgtaatcttgggtgaagttacagatagagctcaagtgctgactggacaacttagtaaaacccttccccaatatatgaagaggcctggctgagtagtagaacacttgtccaacatgtgcgagaaccactgtgtgatccccaagaataatggagaggataaggaaacccagacctcaggcgatgtccccaaagtgtcctgcaggtgcttggtgtgtgctcttggaacttcttttatatttgtctttttttttttttaagtttattacattttcagacatggccacacgatacagtcctggctggcctggaacttctagaccagactggacttgaatctgcagggatccacttgcctctgcctcccaagtgctgggacttagggtgattattgtgttgtgtgtgtaaatgtgagcacacatcatagcttgtgcatagagcggtcagagaacaacttatggagtaaatttcaggggtcagtcttgtcatcaggcttgtgcaccacgccatcttgctcgctcctttatgtcttcttctattgtttattatctgtcgttttgttctgtgtaaataatatcattatatcatgcttactcaataccttgatgtttaacagcatacccttgggtcctagctgtcttgccggccccccttagaatctgttgctgccgtccctagcattcttcccttcctcgctccctccactctgcacagctggagccagctggcactttctgtgaggcagcgattgtgaaataggcttttccatattgatgtacgcctaggataagagttatgtctttgtcccaaggtcacaggtcagccctagtccctggtccttagcccactctttcctagagaagtcacagaagtatcctctaatgcataacaaaacctcaggacacttcttgcccctagggactgttacccagggaccagttagcacagcttccttcctgtctagagcttctacctctctcctgtcccctggacctgcttatgggaagatcagttctttgagagtcttcatgttttgtccttgcaacttttgtgggaggtgttctgctgcgtataagacgagtctgagattcgagaggttgagagaccatgagtatggatgccaggtgtatgtgtgtgtggatataggcataggtgtatgtgcatgtataggtataggtatatgtgcacatataggtgtaggtgtatgtgatatataggtataggcatatgtgcatgacaggtgtaggtgtatatgcatgtataggtaggtgtatgtgcatgtataggtataggtatatgtgcacatataggtgtaggtgtatgtgatgtataggtatatgtgcacatataggtgtaggtgtatgtgcctgtataggtgtatgtgcgtgtggacataggcataagtgtgcaacatcagatgcctcctctatcactcaccagcttggttttttgagacaatctcttgctgaacctgggacttgctgtttcagctacactagctcaccatctagctacccccctcctccaacctgtgtgtgccctgtgttagggccacagccgctgcactgctccacccaattttttcatgcatgccggggatccgaactcagatcctcgtgcttgtgctgcgggcactccattcactgaacatctccccatcaaagccaggaggctgaggcaggcagatctctgagttcaaggccagcctggactacagagctagttctggaacagccaaggctacacagagaaacacgatcttaaataagttttgtttgtttgtttgtttgtttttagttagggtctctatagtcttcctggatggtctcaaactcatggaagactaatggtgtgctccactactcttggccnnnnnnnnnnnnnnnnnnnnnnnnnnnnnnnnnnnnnnnnnnnnnnnnnnnnnnnnnnnnnnnnnnnnnnnnnnntgattttttgtttgttttttgttttgggggggctttttgtttttcaagacagggtttctctgtgtggccctggctgtcctagtaactcactctgtagaccaggctggccttgaactcagaaatccgcctgcctctgcctcccgagtgctgggattaaaggcgtgtgccaccactgcccagctggaatgattttttttttttttgagacagggtttctctgtgcagccctggctgtcctggaactcactctgtagaccaggctggcctcgaactcagaaatccgcctgcctctgcctcccaagtgctgggattaaaggcgtgtgccaccacgcccggcttggaatgatttttttaaagcatctacttttttgagagtttcatacatgagtacgtatttacaacatttccaccccattctctcttcctccaaatccttctatgcttcctgatccctctttaaacacacacacacacacacacacacacacacacacacactgttttgagtttgtttgttggttggtttgtttttgtctcctgtagcccaggctggcttcatattcaccaagtgctaggattagacgtgggctctatcctgcccagttttatactgtgatgaggatagaccacagacttcatgctaggcaagcactctacaaactgaactacatccctagcccgaaaggcttcttctgagacacacagcccagcagggtttcaccccagacttccttggcaccctcaccctctcccgtgatgctcttgtggagttggagggcaacttcctcagcccagctgttgctttgcagacaatgcctccgacaaggatttggcagacctggtctccgagatggaggtgatgaagctaatcggaagacacaagaacatcatcaacctgctgggtgtctgcactcaggaaggtgtggcaggagcagggaatcagatgcgcagttgggatgcaaaggaccactcttgccagacttcccatcccctggtccatggcttccctctgtagggcccctgtacgtgattgtggaatgtgccgccaagggaaatcttcgggaattcctccgtgcccggcgccccccaggccctgatctcagccctgatggacctcggagcagcgaaggaccactctccttcccggccctagtctcctgtgcctaccaggtggcccgaggcatgcagtatctggagtctcggaaggtgtggacaaaggacagttgtgctggggtctccacaccttcttgctgggggcactgaatgtcctcagcagcccccttgtttccagctcacaggtctatcctttaaccatcattcccatacatttgcagctaaccctgcagatccccatctgtaaccccgcgggtccccattctctccacccattcttttacccgagggcaagcatggctcaggcgtgggctctgaacaaatgtgcttctttctttttctctttctggttctggggattcagcccaggcctttgcccattccatttatcatctgttccggggctgagggactggctcctgggcttgctgtgaaatgatcaactcccagacctgtgtcttgatactcctaaactccctacctgtcctcagtgcatccaccgggacctggctgcccgaaatgtgctggtgaccgaggatgatgtgatgaagatcgctgactttgggctggcacgtggtgtccaccacattgactactataagaaaaccagcaacgtgaggggcacctcgggagcgaggcggggactagacctggtctgaaagggataggtcctatactactcacaccactgtccccgcctccttcctccagggccgcctgccagtcaaatggatggctccagaggcgttgttcgaccgtgtgtacacacaccagagtgacgtgtgagtctgggaaatgggttctaagatggctgctgcctgtcttcaagtcgtcatcccctctaaaagggcaaggcgcttgccaaagtcacgagatcttaggagttcttctgacactccaaaagaaaggagtgcccctccctatccccaagggtggatcttgaccgcaatagcctttactacagcttcaaggaggaaggaaggaaggaagctgggccctgctgagccacagttctgcctccaggtggtctttcgggatcctgctgtgggaaatcttcaccctcgggggctccccataccctggcattccggtggaggagctcttctcactgctgcgagaggggcacaggatggagcggcccccaaactgcccctcagagctgtaagctcaccctccttgccccagtggtcagacctcatctgcggtcctgactttgacgtcagcttttggccctggccgtcccactcacggtccctcctcttcttctccactcacggtggcctggtcttgttcctactctcccactaaactgccctgcgcagccccaccccaccccatccccagccacgacccccacaccccaaccctagggagcgcacagtcctcactttgcgggccctacacacaaacctctttgacctgttcccaggtatgggctaatgagggagtgctggcacgcagccccatctcagaggcctacttttaagcagctggtggaagctctggacaaggtcctgctggctgtctctgaagaggtactgcccattcccgcctcgtgccctctctctgcccgctcccatgacctagggatatgaacacgaagcatcctgtccccaaggctggaagctgaccagctctgttccttgcagtaccttgacctccgcctgacctttggacccttttctccctccaatggggatgccagcagcacctgctcctccagtgactcggttttcagccacgaccctttgcccctcgagccaagccccttccctttctctgactcgcagacgacatgagccggggagcagcaattttgtatgggctacgcggcccatggccgtgggtctcctcgctgagctgcaacctgatgcatcgacatttaatgttggcagtgtcaggcctctgacttgagactactgctgtcgcagatcctctctctggccctgttttggggagggccattcttggtcctaaggttcatagttgaggccttctgttccagccttatgctcccatctcagagttcaactctcatctcaagatcatggccttgcccttggactcatcctcagagaagttaagcattaaggccttggcacgcagcctccgtctccggggctctccgggcctagctgcaaaacttatgctctaaacatttctagttcccccaaacaacctagaaggccttgggacttcacatcccccagcacacaagcctcaccaccccctgccatcccccctccattgcttgttccagcatcttggtgaaaggggcatcagctctggtgtccctgagagacgggaagcctgtgggaacgacagaagaacatggcatttttataaattatttttttgaaataaatctctgtgtgcctggtggcttccctgtgtggcagggtgtagggtgggaagattttccacgttgggagtttggtctgggtggcacagacgactgaggaggtgggtgccaggccttcagctggcttctgcctccagctgtgctatagcagactcagaagcagataagcgcacccttgcctttgtctgtctgtccgtccgtcctacagaactatccttgtatatgccacggttggtgagtgagtgctcgagggcagatgagcccacactacaccatctgtaaggcaggccctgtatcctctgcacacgcatccatgtttggcccaagacttgtccccaagggagctggcgtcccctcccccatctgctcagcattaaccaaactgaccgttaacacagcacgaaggaaacgtgaaatcaagcctccagccgcagcctgctcccacggtctggatctgcccgctcaggctcagggcttgtgggggccgtgcccgccctgcctggccctggcctgtctcccaggcagcagctggttaccgcctggctgagctgcagctgtccccacttgcatgatcctccctggaggctgtcacaaccctgttctcagcccccaccccagagagatcagcttcccagagctctgagcctggaaatgtactggactccattctgacagtttcagctgctccctaaccctgaacattagggtgggcagggagaggccgaaagtggttccagactttctgctccctggttcctacaagctctctgggagtgaggactgcaaatgtatttaggcttccagagactcatgtacaaatttaagggtagctctaaagagatggctcattgcttaagagcacctgtaactttccccagggacctggttttgattcccagcacctactactactaccatgtgtgaccccagttcctaggcaatcaacatcctcttctgatttccatgggtaccggacacacagacatatacatgcaggcaaaaagttcacatatgtaaaaagaacacaaaagtaattagatatagatataaagatagatagataggtagatagatagacagttggctccctgtatacataccatacataataaccaaatattctgatggcctagttggtcatcagtgggaggagaggccctaggtgctgtgaaggttctatgccccagtataggggaatgccaggactgggaatgggagtgggttggttggggagcaagggaaggggagaggataggagattttcagaggggaaactaggaaaggggataacattttatttttttatttatttttttattttttttaagatttatttatatgtgagtacactgtagctgtcttcagatgcaccagaagagggcatcagatctcattacggatggttgtgaaccaccatgtggttgctgggatttgaactcaggacctttggaagagcaatcagtgctcttacccactgagccatctcgccagcccggggataacattttaaacgtaaataaagaaaatatccaataaaaaaacattctttttttttttttctagacagggtttctctgtatagttctggctgtcctggaactcactttgtagaccaggctggtctcgaactcagaaatctgcctacctctgcctccccagcgctgggattaaaggcgtgcaccaccacgccaggccaaaaccaaacattcttattgagacccgcttccaaactcagtttcccgttagagattactagtcagtgactgagtcctgtcaccactccaggtgtccgtcttgaggcggagtacttgggtttgcctgggtcaggaaatgattgggaggttgggatgaggtaaacaaacagaccaagagatgcagatcaaaagccccatggtgcacagttccactgctgggccatggctactcttgagtcacctgatggtctctgcacagctttaccacagagaggctgttctcccttccgtgaaaccaagaaatgtgtctaatgcaatattacccacctctagtccaagctactaaggagactgaaggaagtttaatctctcaaattcaagaactgggggaagggctggagagatggctcagtggttaagagcgcccggagcacatgcagaggacctgaatcagttcccagcatcccccatgtgtggcttacaatcagctctaacttcagttctagggcgactggtgccctcttctggcctctgctggcacctgtatgcactgtgcacctatttatttaaaaataaaatatatattttttaattaggagtttgaaatcagccctgcatgcatagggggttccatatagagctgagctgacaccctgggctctcaataggccttgcctatgcatatcagaggccagaacctggttgttcagagtcatagggacagctctgcctgataatttctgggttccaggagtgacatagtgagactgcctctcagaggaaaagaaaagactccactcagaaagccaagcaggtgggtccgctggatttggaggccagcctggggtaaaggaacagaccttatctccagaaataaataaaaagtcgggaatggcgggttcgatcctgtaatccccactcagagtgcccgaggcaagaagaccccctcacatttgaagccagcctgggacacagaatgagttataagccagcctgagctacagggtgaaacatagtctttaaaaagaaaaaaagattaaaatcagagcaggccagacgtgatggcacttgcctgaaaccctacagagctacagagatctccgtgagtttgggaccagcctgctctacatagtgagaggtccagtcagaccaaggctaaggagtaaagccttgtagcaaaaacaaaaaacaaaacaagagacaaagaggagtcggatttgattaccagtactgtgaagacaggacaaaacaaaaaacagggttctctagaacagcagaatagacaccccgagttctcggcaggccccgtgcataacagagcccagaaccaggctgcttagagtgataggaacagctgctgcctggtaatttctggggtccgggaaagcttggatggcctgcccgcagcccctccctgccaacgtccctggcaggcacacagttgctggggctgtctcacattcctgacgtcccatgtcaggacacagatgctgctaattccccagtgcaagctttgctgctccgtcaagcctgccctccacagcgggctctgggcagcatggcaacagctggagcctggccccttagtctctcccggttctgagcagcttccaagtctctgaacagcactgggctcctctccagcaggccactggcagactctgctgagagggacaaacagacaacactctgatcagggaggctccagcccacgtacgtccgcgaagctaacaggagcacctggaaggaagagtccgggatgcgagggggtagcaaggtggccagttgccctctgagtctgtttccctgcctataacagggatgaaggatgacacctgccaaccagagcccagagcctgagtgcttcgtaaacagcagcggctgttactgcacggtgattaaggcagggcctctagggcaagctgccgcgctggggtgggggtggggcactggcccgttcccttctctctgggcagtccttccaggaaggccttctcacccggaacactttcctgagggggaaactgaggctcagaagttggaagcaattggaccgtatcccgtgcagcagaatagaggaagtgggacgtcagacaagttgtctattcccttctgatctcatttccatgtcctaggtggcccgataagttttaactgcagtctatgacctggtgcctggtacacaccaatgccttccccgggttttccttcccgggaacatttctcctgcccttcactagtccaaggctggaggctggagctggagcttagtcaggagatgcaaactagcattcttgaatccagggctcaatctgcagcactgcataaaccaggcatgccctagagtaaaagccagccttggagagatggaaggcttagaagctcaagggcatccttagcctcagtcgggttggaagtcagcctagagacacagcttactcagaccccggttctcatgacagtgtcctgtgtcctctccactgatgctcagtctaaacctgcgctgtgcctatgcactcattactgagaagggatgccccacgctggggggttagcttggctgatagttcttacctagtaagcctgagatcccgggttccctccccagtgcccacataaaccccctcacagtgactcagtgagcctcagcacttgggggctgaggggaggggagagccatggatttaaggctgcctgggctgtacaatgagttctgaggctggcctaggctccagggtggaagttgcttcaaaacaaacaaacaaacaaacaaacaaacaaaccagggaagacttcccaagacagcccacaaggaagaaaggaagccagcctgcttgaatagagaacgctatcttatttttccttttggctccttaggctggagattgcacatagagcccaacacatatccaaccagcaagactcctaccaccagctaaactcagattttttttttttttttttttttggtttttcgagacagggtttctctgtctgtcctggaactcactctgtagaccaggctggcctcaaactcagaaatccacctgcctctgcctcccaggtgctgggattaaaggcgtgtgccaccaccacccgactaaactcagatctttaatgtgttttctaatcatgtatttacttatatattagggaaggagggcacgtgtggaagtcagaggaaggcttgaagagttggttctttccttctaccacgtgggtcctggggatttaactcaggtcttcatgcccagaggcaagcgaacacacctcttgagccatttcactgagatatctctatggcccctcctatgtttttctttttcttttttcttttttcttttttttttttttttttttttttttttttttttggtttttcaagacagggcttctctgtatagccttggctgttctggaactcactttgtagaccaggctggtctcgaactcagaaatctgcctgcctcccaagtgctaggattaaaggcgtgcgccaccatgcccggctcctcctatgattttcctaagtagcagatttgaaactttggcatacatcacaatgacctagaggatttgggttgctggagctctaccccaggaatgctactggaaaggtgggaaccagcatttggggaaccacagtgtctgagtcaatatatgtacatgttttacacagtttttggaagcttagtaaggcatatgttgctatgcaagcatgagaaccagagttcaaatcccaagcatgcatatacaaaggcaggcagcagacaggaggatccctgggacttgctagctgccagcctagctccaggttgaatgagagaccctgtctcaagggaataaggcagccagtaatagagcagggtacctgtggcctctacagacacatgaatgggcacgaaccacacacacacacacacacacacacacaaacaaaggcagcccaagcctggggctagagtagagcgctgagatgcttgctcagcccatgcaagggctcatcacaggcacaccaagacttcaatgagaagcaaccccttcccctttgtcccatcctctctccatatccctgtcccttgcttgcatgacccttgatcctgttaagctattaccattcttgtttacacccctaaatcccaacccagggcacacatggcagaaatggggcacagtgaagcagcgtgaaggaaggaacagggacagaggtgacccattcccacgcctaggcaccgtcacatgtgtatggccaagcccatacatatgcagtttccccttgctcgctacctcccataccactgggcctctaactgggagcctccgcgtcacctgctgtgggatttggcctaatctaggagtatgtgctccaggaggcagctgcagctctcccctccggaggaaatatcctttttattcccttactgcagaaatctgaccttcgttggcacctgggctccacggctggagcctgtccccaagaagcaacagaggttgggcgtgaaatcaacaacagctggacgtcaccagctttgcccacatcctttctagtcccatcaacgttcacattccatagcatcaactccttcccggtccccgggtgccaggttaacactgtcctcttgctgctgttagagcatcagcctgacctgaccctgaggctatggcttgagctcttcatatctctggaacctccaagtcacccttgtacacggcagggctcaacttagtgccccttcccttcagaaaacataccacctgtcctgacctcacagcatggcctaggcattccatgtctgcacacatctgcacacatctgcacccactgatgtctacctcatccaaagcagggttctcatgggactcatctctgtgatctctggcccaaggaggagcagaccaccctgaggcttttcatttttaatttttttctttcaaaattaacatttttattaaatcaagtttaaaaatgttcattgcagaaaagtcaacaagggtattaagaaaatcaaaatatacctttttttttttacaatatatgtatattagcagcaaaactacttcagagtttttctttggtgtttatttttattttaaagaaagcatagcagtgctatgttagcatggaatgtcataatcccctccccgttagcttggaatgtcagaatttccaccttcaccctttactcagaggtactggtctttcttcatggaggcaggagaggaaggtcagctgataggagggagacaaccatacccataatgaacagtaaggctgccttcaaaacagggcatagaagccagatgtatgggactggagagatggctcagtggttaagagcacagattgctcttccagaggtcctgagttcaaattccagcaaccacatgttcaagctcacccccaccatggaatctgatgccctcttcctgtgtgtctgaaaagagcaatggtgtactcatatataaaataaataaataaatctttaaaaaaaaaaaaaaaaaaaagacagctgccgggcgtggtggtgcatgcctttaatcccagcacttgggagacagaggcaggcggatttctgagttcgaggccagcctggtctacagagtgagttccaggacagccagggctacccagagaaaccctgtttcaaaaaccccaaaaaaaaaaaaaaaaaaaaaaaaaaaagaagccagcatggtggtgcacgcctttaatcccagcactcaggaggcagaggcaggcgaatttctgagctcaaggccatcctggtcacaaagtgagtttcaggacagccagggctacacagagaaaccctgtcttggaaaaaaaaaaaaaaaaagatgtgctatgtatgcctatgatctgagcacaccacacagaggtcctgatgctatgaccttttaccttgcattgtggtgaccccacaaccacaaatttatttcattgttgcttcctaactataattttttactaccattatgaattataatgtaaatatctgatatgcaggatattatattctattcccgtaaaatggtcatttgataccccccaagttaagaaccataggttgagaaccaatggtttagagccttcaacaaagggctcctctgctcagatgagggtgcgcaccccaaatcccagcactcaaagagggaggcgccctgtgagattgaggtcagcctgctctacagagttacagccaggagtacacagtgaggccttgtcccaagcaaaaacaaaaacgggactgttctagatgttctgatagtggatgccgtttagtgagatccttgggtgtgatctacattggagaagaaaggaagggagggagggaagggaaggaagtctttgcgagactgttaggaaatgacctcaaccttgtacttcagaatggaaaaagccaaggtgctgggatgtagctcagttggtagagtgcctgcctagcatacacagagacctggattcggttcctacccctgcataaacaaaagcatgtggaccctaagtgggtgtttgcagtgactttaaaaaaaagatttatttattattataaataataattattattaattagtcagatctcattacaggtggttgtgagctaccatgtagttgtgggatttgaactcaggaccttcagaagagcagtcattgctcttaactgctgagctatctcctgagtacctttcagggacttaggaacagtaagcaggtaatgactgggacagcagttgtatcctcctgggagggaaatgaaagaggatcgggagttcaaggccacctacggctacataaggccctgactcaggtcagaggggtgatttaccagagaaaggcatttgtgagctagccttatcacctgagttcaattctctgggtctcacatggtggaaaaaagaataccaactcccataaattatcatctgacctttacatacacattcatgctcacacaaatgcataaagtataataaaaagttttaataataataataataatgataataatgatcctgtctgaaacactgaaaaagaaagaagggggtgtatgatggcttaagcctatattcccagtagtttaggaggctgagacaggaggattgttgtgagttggagggtaacctggactacaaagtgagttccaggtacaattttacctcaaaaccaaacaaaagaagagaaatacaagatcagttattgatgtttctgaggaagtgacctcagtgcccccaatgcctgcgagtactctctccaccagacattttttcagtcactgtgcatgccgtgaagatggcctggtccctgcccgcaggagtgaagacagatagataggcttgctccccgccccccaggagtttccagtgaaataaacaaccaagaaagtactgactatgattaaacagagaaccctgcaggtcaaccacttgacaatcctgcaagacagatcatgatgagccttcgggaagcgctccatgagggaatcaaacctgagttgcaggccagtgcctgtcttgagagagtgggagggagaccattccaaagagagggagcaggctctgcaaaggcccagaacatggcaggcagggacagggagatctgaggagctccaggtcactcatgtagacagagtgaaaaagaacagggcatcagatgaagcccactgtagcaggccagtgaagagaccagagagcccagtgaggtggttgatagacttagttatgcctagagacacagctgggaactgggacatgacttcctctggagacaaaagcaaggagccagagagtagtttttgtttgtttgtttgtttgtttgttttaattttatttatttaatgtatgagtgctctgctgcacatacacctgcctgcctgaagagggcatcagattcccccatagatggttgtgagccaccatgtggttgctgggaattaaattcaggacctctggaagagcagccagtgctcttagccactgagctgcttttctcaccagccccagaaagagccacaactcactccctctcccatcccctggcctgaggcctagacctccggaatcccaaggctccagcttggaccaggagtttccaagtcaggcataaagaacttgccaaaaaggagcctttagtcacagcacccttgaggcagaggcaagatctctatgaccgagtaggaggctcgcctggtccacatagtgagttctaggccatccagggctacgggcagggatgtgggacagctcaggactacagcatttgctcaatactcacagggcaatgtgagtgatttaggggcctgtggggc

SEQ ID NO: 3484 - DNA, 6546 bp, Mus musculus
ccaacggggagctcccgcactagggtaccgggctgacatttgccgggtctcggaccacgcctctcagatcagaagtggtccaggaggggcggagtccgaggtgggcggggcaggagggggcagccccccgccacgctgcagttgcagggacattcctggctcttcggcccggggcggaggagctccgggcgggtgagtgtgccagccctgccgggatcgtgacccgcgcgcgcgggagccgggcggcggaggagccaggaaggtggtcagtgggaagtctggccctgatcctgagatcagctggaaggaaatgtggctgctcttggccctgttgagcatctttcaggggacaccagctttgtcccttgaggcctctgaggaaatggagcaggagccctgcctagccccaatcctggagcagcaagagcaggtgttgacggtggccctggggcagcctgtgaggctgtgctgtgggcgcaccgagcgtggtcgtcactggtacaaagagggcagccgcctagcatctgctgggcgagtacggggttggagaggccgcctggagatcgccagcttccttcctgaggatgctggccgatacctctgcctggcccgtggctccatgaccgtcgtacacaatcttacgttgcttatggatgactccttaacctccatcagtaatgatgaagaccccaagacactcagcagctcctcgagtggtcatgtctacccacagcaagcaccctactggacacacccccaacgcatggagaagaaactgcatgcagtgcctgccgggaatactgtcaaattccgctgtccagctgcagggaaccccatgcctaccatccactggctcaaggatggacaggccttccacggggagaatcgtattggaggcattcggctgcgccaccaacactggagcctggtgatggaaagtgtggtaccctcggaccgtggcacatacacatgccttgtggagaactctctgggtagcattcgctacagctatctcctggatgtgctggagcggtccccgcaccggcccatcctgcaggcggggctcccagccaacaccacagctgtggttggcagcgatgtggagctactctgcaaggtgtacagcgacgcccagccccacatacagtggctgaaacacgtcgtcatcaacggcagcagcttcggcgccgacggtttcccctacgtacaagtcctgaagacaacagacatcaatagctcggaggtagaggtcttgtatctgaggaacgtgtccgctgaggatgcaggagagtatacctgtctggcgggcaactccatcggcctttcctaccagtcagcgtggctcacggtgctgccagaggaagacctcacgtggacaacagcaacccctgaggccagatacacagatatcatcctgtatgtatcaggctcactggttctgcttgtgctcctgctgctggccggggtgtatcatcggcaagtcatccgtggccactactctcgccagcctgtcactatacaaaagctgtcccgtttccctttggcccgacagttctctttggagtcgaggtcctctggcaagtcaagtttgtccctggtgcgaggtgtccgtctctcctccagcggcccgcccttgctcacgggccttgtgaatctagacctgcctctcgatccgctttgggaattcccccgggacaggttggtgctcggaaagcccctgggtgagggctgctttgggcaagtggttcgtgcagaggcctttggtatggatccctcccggcccgaccaaaccagcaccgtggctgtgaagatgctgaaagacaatgcctccgacaaggatttggcagacctggtctccgagatggaggtgatgaagctaatcggaagacacaagaacatcatcaacctgctgggtgtctgcactcaggaagggcccctgtacgtgattgtggaatgtgccgccaagggaaatcttcgggaattcctccgtgcccggcgccccccaggccctgatctcagccctgatggacctcggagcagcgaaggaccactctccttcccggccctagtctcctgtgcctaccaggtggcccgaggcatgcagtatctggagtctcggaagtgcatccaccgggacctggctgcccgaaatgtgctggtgaccgaggatgatgtgatgaagatcgctgactttgggctggcacgtggtgtccaccacattgactactataagaaaaccagcaacggccgcctgccagtcaaatggatggctccagaggcgttgttcgaccgtgtgtacacacaccagagtgacgtgtggtctttcgggatcctgctgtgggaaatcttcaccctcgggggctccccataccctggcattccggtggaggagctcttctcactgctgcgagaggggcacaggatggagcggcccccaaactgcccctcagagctgtatgggctaatgagggagtgctggcacgcagccccatctcagaggcctacttttaagcagctggtggaagctctggacaaggtcctgctggctgtctctgaagagtaccttgacctccgcctgacctttggacccttttctccctccaatggggatgccagcagcacctgctcctccagtgactcggttttcagccacgaccctttgcccctcgagccaagccccttccctttctctgactcgcagacgacatgagccggggagcagcaattttgtatgggctacgcggcccatggccgtgggtctcctcgctgagctgcaacctgatgcatcgacatttaatgttggcagtgtcaggcctctgacttgagactactgctgtcgcagatcctctctctggccctgttttggggagggccattcttggtcctaaggttcatagttgaggccttctgttccagccttatgctcccatctcagagttcaactctcatctcaagatcatggccttgcccttggactcatcctcagagaagttaagcattaaggccttggcacgcagcctccgtctccggggctctccgggcctagctgcaaaacttatgctctaaacatttctagttcccccaaacaacctagaaggccttgggacttcacatcccccagcacacaagcctcaccaccccctgccatcccccctccattgcttgttccagcatcttggtgaaaggggcatcagctctggtgtccctgagagacgggaagcctgtgggaacgacagaagaacatggcatttttataaattatttttttgaaatccaacggggagctcccgcactagggtaccgggctgacatttgccgggtctcggaccacgcctctcagatcagaagtggtccaggaggggcggagtccgaggtgggcggggcaggagggggcagccccccgccacgctgcagttgcagggacattcctggctcttcggcccggggcggaggagctccgggcgggtgagtgtgccagccctgccgggatcgtgacccgcgcgcgcgggagccgggcggcggaggagccaggaaggtggtcagtgggaagtctggccctgatcctgagatcagctggaaggaaatgtggctgctcttggccctgttgagcatctttcaggggacaccagctttgtcccttgaggcctctgaggaaatggagcaggagccctgcctagccccaatcctggagcagcaagagcaggtgttgacggtggccctggggcagcctgtgaggctgtgctgtgggcgcaccgagcgtggtcgtcactggtacaaagagggcagccgcctagcatctgctgggcgagtacggggttggagaggccgcctggagatcgccagcttccttcctgaggatgctggccgatacctctgcctggcccgtggctccatgaccgtcgtacacaatcttacgttgcttatggatgactccttaacctccatcagtaatgatgaagaccccaagacactcagcagctcctcgagtggtcatgtctacccacagcaagcaccctactggacacacccccaacgcatggagaagaaactgcatgcagtgcctgccgggaatactgtcaaattccgctgtccagctgcagggaaccccatgcctaccatccactggctcaaggatggacaggccttccacggggagaatcgtattggaggcattcggctgcgccaccaacactggagcctggtgatggaaagtgtggtaccctcggaccgtggcacatacacatgccttgtggagaactctctgggtagcattcgctacagctatctcctggatgtgctggagcggtccccgcaccggcccatcctgcaggcggggctcccagccaacaccacagctgtggttggcagcgatgtggagctactctgcaaggtgtacagcgacgcccagccccacatacagtggctgaaacacgtcgtcatcaacggcagcagcttcggcgccgacggtttcccctacgtacaagtcctgaagacaacagacatcaatagctcggaggtagaggtcttgtatctgaggaacgtgtccgctgaggatgcaggagagtatacctgtctggcgggcaactccatcggcctttcctaccagtcagcgtggctcacggtgctgccagaggaagacctcacgtggacaacagcaacccctgaggccagatacacagatatcatcctgtatgtatcaggctcactggttctgcttgtgctcctgctgctggccggggtgtatcatcggcaagtcatccgtggccactactctcgccagcctgtcactatacaaaagctgtcccgtttccctttggcccgacagttctctttggagtcgaggtcctctggcaagtcaagtttgtccctggtgcgaggtgtccgtctctcctccagcggcccgcccttgctcacgggccttgtgaatctagacctgcctctcgatccgctttgggaattcccccgggacaggttggtgctcggaaagcccctgggtgagggctgctttgggcaagtggttcgtgcagaggcctttggtatggatccctcccggcccgaccaaaccagcaccgtggctgtgaagatgctgaaagacaatgcctccgacaaggatttggcagacctggtctccgagatggaggtgatgaagctaatcggaagacacaagaacatcatcaacctgctgggtgtctgcactcaggaagggcccctgtacgtgattgtggaatgtgccgccaagggaaatcttcgggaattcctccgtgcccggcgccccccaggccctgatctcagccctgatggacctcggagcagcgaaggaccactctccttcccggccctagtctcctgtgcctaccaggtggcccgaggcatgcagtatctggagtctcggaagtgcatccaccgggacctggctgcccgaaatgtgctggtgaccgaggatgatgtgatgaagatcgctgactttgggctggcacgtggtgtccaccacattgactactataagaaaaccagcaacggccgcctgccagtcaaatggatggctccagaggcgttgttcgaccgtgtgtacacacaccagagtgacgtgtggtctttcgggatcctgctgtgggaaatcttcaccctcgggggctccccataccctggcattccggtggaggagctcttctcactgctgcgagaggggcacaggatggagcggcccccaaactgcccctcagagctgtatgggctaatgagggagtgctggcacgcagccccatctcagaggcctacttttaagcagctggtggaagctctggacaaggtcctgctggctgtctctgaagagtaccttgacctccgcctgacctttggacccttttctccctccaatggggatgccagcagcacctgctcctccagtgactcggttttcagccacgaccctttgcccctcgagccaagccccttccctttctctgactcgcagacgacatgagccggggagcagcaattttgtatgggctacgcggcccatggccgtgggtctcctcgctgagctgcaacctgatgcatcgacatttaatgttggcagtgtcaggcctctgacttgagactactgctgtcgcagatcctctctctggccctgttttggggagggccattcttggtcctaaggttcatagttgaggccttctgttccagccttatgctcccatctcagagttcaactctcatctcaagatcatggccttgcccttggactcatcctcagagaagttaagcattaaggccttggcacgcagcctccgtctccggggctctccgggcctagctgcaaaacttatgctctaaacatttctagttcccccaaacaacctagaaggccttgggacttcacatcccccagcacacaagcctcaccaccccctgccatcccccctccattgcttgttccagcatcttggtgaaaggggcatcagctctggtgtccctgagagacgggaagcctgtgggaacgacagaagaacatggcatttttataaattatttttttgaaat

SEQ ID NO: 3485 - protein, 789 aa, Mus musculus
MWLLLALLSIFQGTPALSLEASEEMEQEPCLAPIQQEQVLTVGQPVRLCCGRTERGRHWYKEGSRLASAGRVRGWRGRLEIASFLPEDAGRYLCLRSMTVVHNLTLLMDDSLTSISNDEDPKTLSSSSSGHVYPQQAPYWTHPQRMEKKLHAVPAGNTVKFRCPAAGNPMPTIHWLKDGQAFHGENRIGGIRLRHQHWSLVMESVVPSDRGTYTCLVENSLGSIRYSYLLDVLERSPHRPILQAGLPANTTAVVGSDVELLCKVYSDAQPHIQWLKHVVINGSSFGADGFPYVQVLKTTDINSSEVEVLYLRNVSAEDAGEYTCLAGNSIGLSYQSAWLTVLPEEDLTWTTATPEARYTDIILYVSGSLVLLVLLLLAGVYHRQVIRGHYSRQPVTIQKLSRFPLARQFSLESRSSGKSSLSLVRGVRLSSSGPPLLTGLVNLDLPLDPLWEFPRDRLVLGKPLGEGCFGQVVRAEAFGMDPSRPDQTSTVAVKMLKDNASDKDLADLVSEMEVMKLIGRHKNIINLLGVCTQEGPLYVIVECAAKGNLREFLRARRPPGPDLSPDGPRSSEGPLSFPALVSCAYQVRMQYLESRKCIHRDLAARNVLVTEDDVMKIADFGLRVHHIDYYKKTSNGRLPVKWMAPEALFDRVYTHQSDVWSFGILLWEIFTLGGSPYPGIPVEELFSLLREGHRMERPPNCPSELYGLMRECWHAAPSQRPTFKQLVEALDKVLLAVSEEYLDLRLTFGPFSPSNGDASSTCSSSDSVFSHDPLPLEPSPFPFSDSQTT

SEQ ID NO: 3486 - DNA, 31293 bp, Homo sapiens
gaaaccccgtctctactaaaaatacaaaaattagctgggcatggtgacaggtgcctgtaatcccagctacttgggaggctgaggctggagaatcgcttgaacccaggaggcggaggttgcagtgagccgagatcacgccactgtactccagcttgggcgacagagcgagactctcaagaaaaataaataaataaacataaaaacaagtatctttgaataattttttctttaacaccaatagtcagccaaatatttgttatgtaaagtcgttaagtttaaaagtaatgtgttatgaagcaatggataactaatacaggtctttttcctaaaagccatggaaatttattaaaaggttttaaacaaatagcagtgaaaacaggatgaatttgctgccatgtaaacaaatgagtactatggccaaagagccaacagaggagagtggagacacaaaggaagggtgttctactgagaaggagccttttatttataaagggtttaagaaaaaggattagccgaagaaaaaattatttggttcacatagtgaaatgttcaaagaaggaatggcttcaggcaaggcttgatccgggtgcactccagctcttggccctcttgtttcctttattgctgtctttcacagagaagctctcccaagcaactctaggcatccctattcacagctcagcttctcagagagttggtttcctattcattccaataaaagacctagactggctcccattggccctcccatggtcacatgctcatctctgacttaatcacaatggcctgggagatggaatattctccttagccaggtctgggtcacatgtccaccataaatgccaaggaggagtgttggtttcatccagtcccccgtggactgctagtaggggaggaccacgacatcaagaaaagtttgaggggtcgttaccagagagaggaaaagggttttaatgtccagtttagggtggccaggagggatctgaaagaaaaaggaatgcctggccaggcgcggtggctcacgcctgtaatcccagcactttgggaggccgaggcaggtggatcacctgaggtcaggagctcgagcccagcctggtcaacatggtgaaaccccatctctactaaaaatataaaaattagctgggcatggtggtgagtgcctgtaatcccagctactcgggtggctgaggcaggaaaattgcttgaacccgggaggtggaggttgcagtgagctgagattgcaccactgcactccagcctgggcaacagagcaagactccatctcaaaaaaagaaaagaaaagaaaagggaatgcctgagaggagtccagaaatacctgctgaatggcaggtatctggtagaatgcctggaaagcggggaggacagataggcaggccagaggaagaatgctcagcaacaaaggcagcataagcaaagacgccacggtgtcagccagtcaggcacattcagaggctctacctggagctcactgcagctgcgaaacagcaggtgtcttgggggagactggagctgggacagcagagagcagcagaggccagtcctggagggccctgaatgtcaggctgaggagctgggggtgccagtgggtggtggggggagagtagttaagggtgaggagtggcagcacagtggcacatgcctggagtcccagctaatggggaggctgaggcaggaggatcctgcgagcctaacagttgaaatcccatctggcaatgtaacaagaccccgtctctaataaaaataagctggccgggcgtaatagctagtgtctgtaatcccagcactttgggaggccaaggcaggcggatcacttgaggccaggagttcgagaccagcctggccaacatggtgatacccgtctctactaaaaacacaaaaattagccaggcatggtggcacacgcctgtaatcccaggtacttggaaggctgaggcaggagaatcatctgaacccaggagacaggttgcagtgagccgagatcatgccactgcactccagcctgggcatgagactctgtctcaaataaatagataaataaatgattttaaaaaaataaaagctgaggagtgacttggttagatccgtagtttaaagaagtcattttggggccaggcacggtggctcacgcctataatcccagcactttgggaggctgaggcaggtggatcacctgaggtcaggagtttgagaccagcctggccaacatggtgaagctccgtctctactaaaaatacaaaaaattacccagccgtggtggcttacacctgtaatcccagctactcaggagggtgaggcaggagatttgcttgaacctgggaggtggaggttgcagcgagccaagatcatgccactgcactgcagcccgggcgacagagagactcaaaaaaaaaaaaaagtcgttttgggaaccagtcaccgcttctttttgatagcccctggttttgttaggggaagcaaggggttcagcaaaatgaatatacttcctggcttcctttgcagctaggggtggccgtgtcacagtctggccaaggaaatgaaattgggagttgctgtgtggaaactcaactctctggaacttcttccttcctcctgcctctgcacaaatgtgacggcagcagctgaagccaacatcttgcgaccatgagagaaaaacctggagaacggacgagtcctcaaccctgacttcagaccaacctacacccacctctggacgtggggctaagtgagagatggatacactgtttcatttaggccctgctcacttaggtttctgttattcacaccccaacgaaaccctccatggtccagggcaccgggcaaagtacagaagggcacgagtttacttcccgcttccctggagaccaccaaccctctcacccttccagcccagcctctgccacttcccagctgtcggtcctcctccaaacagacgtgcatgccaacacccggtgggtgtgaggcttgtaggcccaagtctagagaggctgagtctggcaaagcctgaaagcccctgtcctagcaagccaggccacaggtctagagtatccgagaccagtgaataaggggacggggggtgctactgaggctgtgagaagccccaggaccagcccagggtagttagaactgagtgaggttagccgggactaacctcactcagatccctcctccccagttcccctccatccactttggtttggaagcctccccagagctctcccaggctgtcatcagctctaaactctctgcctccacaaaaatgccctgggcaacctgtaactcacagccctgctgtcttcagagtataaactggagacagatgtacccagaattgaggacgggtgggaaatgaggagaaatgaaggctgaggaggggtcattctcacagtccctccctttcggtcacaggagggtgttgcccatgcttttgggtgggtcccaggcccatagctgcaaatattcatattggctactcttcagtgagcaaggggtatatgccaggcactggcattgtgcttgacatacatcatcatactgagtcctcacggaagatgtattattcccatttcacagaagatgaaactgaggcttgaggttaagtgatttgtccgtgaccacaaagagttttcgggactcaaacccagatctgtcactgggcaaggtggctcacacctataatcccagccctttgggagactgaggccagcagatctcttgtggccaggagttcaagcctggccaacaatggcaaaaccccgtctctaccaaaaatacaaaaattagctgggcgtggtggcacacacccgtaatcccagctactcaggtggctgaggcaggagaatcacttgaacccaggaggtggtggttgcagtgagcctagatcgtgccactgcattccagcctgagcgacagagtaagactctgtctccaaaaaaaacccagatctgtccgactctgacacccaacctttaatcactcactttctgtcaatgtcacctccgttttgaccagccaagctagacctccctggagcctgtggagaagccaaggtagaaaagggttggaaaagaatgataaaataggccaggtgcggtggctcaagcctgtactcccagcacttttggaggccgagacaggcagattgcttgagcccaggagttcaagaccagcctgggcaacataatgagaccctgtttcaacttaaaaaaaagaaatggtaatgaacaattgtcaattctgagcagctgggtatggtatgaccctgtgtactttttctgtattttaaaatgttctcaaaataaaacttgtttaaaaaaaaaaaagaagaggacaaagaagaggaggaggaaaaagaagaggaagagtaaggaaggaggaaagaagagggggagggagggaggaaggaaggaaggagaataaatgaagaaagaggccaggcagaatggctcatggctgtaatcccagcactttgggaggccaaggcaggtggatcacctgaggtcatgagttcgagaccagcctggccaacatgatgaaaccctgtctctactaaaaatacaaaaattagcgagtcatggtggtgcatgcccataatcccagctacttgggaggctgaggcaggagaatcgcttgaacccgggaggcggagtttgcagtgagccgcgattgcgccactgtactccagcctgggcaataagagcgaaacttcatcaccaaaaaaaaaaataatgtaaaataaaaaaatgaagaaagaacaagactgggtagggtgcagtggctcacgcctataatcccagcacattggcaggccgaagtgggcagatcacctgaggtcaggagttggagaccagtctggccaagatggtgatttttgtctttaccaaaagatacaaaagtcagctgggcattgtggtgcgcgcctgtaatcccagctactcgggaggctgaggcgggagaagtgcttgaacccggcaggcggaagttgcagtgagccgagattgcgccgctgcactccatcctggatgacagagtaggactccatcttgggggtaaaaaaaaaaaaaaagaacaagactgggcccagagttagggccaggcccgggctgcagtggggcctgggcaggggccgggccggctttagtggcagcccttctgcacaagagccccagtgttccctgggcccggctgccatccaagagcaacatcgttggcaccaggcaacgtctgccctctaccccccgatgactctgcccccaggcaggtggggggtaggacctggcctcaggagaccctcctggcccagcccagcattccagaggcacagagtctgcaaacccctgcctgggcctggtgtctcctcaggactgctggctaaaaggtcaaggagtgcagtgctcagtcccagcccccacacctccctccccaacacactcaccttcaggtgaatctgcaccttcccgggccacagttaaggatggagacagaaagcatctgatgcagtagcatcaatgatcccactctggagagttatcccgagctctccatctttgccccagaagacaggggttcgagttctgcaattcacttgctagatgacctcaaataagtaattccatctccctgagcttgtttcttcacctacaaatcagagctaaggattcctatgccatttggcttggtggaagaattaaaggatataacccatgtacaacacccagcatgatgcctggcatgtaacgggagctgaagagtcacgagctcaggaacaggaacacattcatttcccccaacactcctaggaagaaagaagctggagcagccgggagccgttgctcacgcctgtaatgccagcactttgggaggccgagacgggtggatcacctgaggtcaggagatcgagaccagcctggccaacatggtgaaaccccgtctctacaaaaatacaaaaattagctgggtgtggtggcaggcacctgtagtcccggctactaggaaggctgaggcaggagaggcaggagaattgcttgagcctgggaggcggaggttgcagtgagccaagatcacgccactgcactccagcctgggcaatagtgcgaggctccatctccacaaaaaaaaaaaaaaaaaaaggaagaagaggaagctggagcatgacggctttctgggtggggaaactgaggcagaggcaggttaacagcaggatcttagggtgacaggctcttgcctctgctaagcgagagagagagagagagagagtgtgtgtgtgtgtgtgtgtgtgtgtctgaatgtatttttttttttttttgagacagggtcttgctctgtttcccaggctagagtgcagtgcgtgatcttggttcaatgcaacatctgcctcccaggttcaagtgattctcctgcctcagccaccccagtagctgggattacaagcgtgtgccaccatgcctggccaatttttgtatttttagtagagatggggttttaccatgttggccagggtggtctcgaactcctgacctcaagtgatccgcccacctcagactcccaaagtgctgggattacaggagtgagccactgtgcccagtcgtgtctgaatgtctttgagaaagagactgcaaatgtgactggtgaaagattgcgtgtcagcaagagagtgagacagtgtgaaaggcttaggtgctctccctgactggctcagcttatctcccaggctgtaactgattacttatctgtctgtccccactacaatgtcagcagccccttgaagggtagaagtagggtccaggccaggtgaggtggctcacatctgtaatcccagcatttgaggaggctgacatgggcagataacttgaggtcaggagtttgagactagcctggtcaatatggtgaaaccttgtctctactaaaaatataaaaattagccaggtgtagtagtgcacatttgtaatcccagctactcaggagcctgaggcaggagaatcacttgaacccaggaggcagagcttgcagtgaactaagatcacaccactgcactccagcctggacaacagagcaagacactgtctcccaaagaaaagaaaagaaaaagagtccaattcggggctttatccccaggatttaaaacagtggatgccacataatgaaccttcaataaataatcattcagatgaatgagtgaatgagtgaatgactttgtgagggagcatcagcctctgcggagggtcagtgtgaaaggttatgagtgcggggagaggaggcagacaagggatatggggaacatatcctagggacatcagagggttgcaaatctgagggatttgcgcatctcaggagacaaggaggttgcaagacctgagctatgaaaacttttagtttgtctttggctctggtaaactcaggaaatgcccgggaaggtgaatgaaagccatgtggggtccagctccagctggcggctcaccctgtctccccccacaaccacattcacaaggggagccagcagagggccagaggcagggagctgaacccctccagcagtccgggaggtctggcaaggtaccctctgggcaggcagctcccagggccaggagcctcatctgtcctgggagctccagcaaggcaggactctagagaagggaaccaggacaaattgtttttaaaagataaccaattaaaaaaaaatttataatatacatatatatgtgtgggtgtgtctgtgtgtatgtatatacacacagacacacagacacacacagacacacacacacacacacacacacacatatatatatatatatatatttttttttttttttggagacaaagtctcactctgtcacccagtctggagtgcaatggcacgatctcggctcactgcaacctccacctcccgggttcaagcaattctctgcctcagcctccctagtagctgagattacaggcacatgccaccatgcctggctaatttttttgtatttttagtagagctggggtttcaccatcttgccaggttggtcttgaactcctgacctcgtgatccacccacctaagcctcccaaagtgctgagattacaggcgtgagccaccgtgcccagcctaatatatatttttaatagagacgagatctcactatgttgcccaggctggcctcgaactcctgagttcaagcgatcctcccgattcagcctcccacagtgctgggattataggcatgagccaccatgcctggcctcaattattttctgatttatctttgggaggagaccattctttcgcttaagaagaaaaagaaaaaaacaattttaagtctctttaatgggccttacagttatgcaaagatatgccactatccctttgggagtgagggtggaaagaactagacttgcctgcgtaacaatgagaaaggaagttgcttcttaagacagggtctacactagctagaggggacaaccaggacctgagcctcagacagggtctcgctccatagcctgttgcccaggctacagtgcagtggagcgatcacggctcactgctgcctcgacttcctgggctcaagcaatcctctggcctcagcctcccaagtagctgggaccacaggtgcacccagcccatttcccttcctctcaaggtgccttaagagaaggagaaggcttgagattcaggtgagggatgggcagagatcagaggctgcctggcctcctggtttggccacagtctagatgctcaggagagaagtgcttacaggtgaggcaaacatgagccaggtgggcacggagctatctgggagcacctactgtatgccagacacttgaactctaatggtgaggtctgaggacacagttcctctactgaaaaatagagacagggcaactatgttgccagggctggcctcacactcctgaattcaagctgtcctcctacctcagtctcctagtaactagaactacaggcacccgtcattgtgcccggccattccacagctatttacataattaactgttcagttacaattctggcaagcgtgctgaagaaataacaggtcctaaataattacagctagtattacaaagcaagcgctgcatgccaggcttacacatactgctaacatgtctactttttgcaacaacctcttgtgggtgagactatcatttgcctgttttactgaaaggacagtgaagactgaggccttgtgtgatggtgctgagagctgggcctatgacgtccagccctgtagtctgtgctctgaaccacttcaccctgtttctttctccatcctcacagtagagacgtcatctaagaggagcttgcaagtccagagggcttcctgaaggaagtgagctgagaataatatgaaattaaccagaccaaggggcattccaggaagagagaatggtacgtgaaactgcccaggagtagcagggtgggagccaggaggcgtgggtcatggcaatctatgtataaagagctatgggaatctataggaaaatttaagggagtggctgacacagtcagatttgtgttgtaagtatcactccgcaggttgcgcagggaacaaatgagggagcagaaggaaggggttctcctgtccgctgcacggcactgcgcagaagacaggggagccaggcattccctgaagggtgaaaagcaaggagtagagctgggtagtagactagaatttaggagcctggcctggggcctgggtggggcgaaagaggcggagcctgaatggggtgtgtataggggggttgcgtgtaggggtgtgtgtataggctggggcggggtcccgggagtgggctgactgggtcgggggcggggctctccaggtgggcggggatcttggccacccctggccacacctctctccggctcgagctggtctaggcggggcgggcccgagggggtgtggcaggaggtgggcgggcccgggtgggggggggggggcgtggaaggaggggcgggcccgagcaggagggggcgggcccgaggggcggggcgggacaggaggtgggccgctcgcggccacgccgccgtcgcgggtacattcctcgctcccggccgaggagcgctcgggctgtctgcggaccctgccgcgtgcaggggtcgcggccggctggagctgggagtgaggcggcggaggagccaggtgaggaggagccaggtgagcaggaccctgtgctgggcgcggagtcacgcaggctcgaggtgagccggaacccttgtgggcccgggctgcgctcccagccgccagggggcgagaggcggcggggctacggggactgcccctcccggcgcaggggacctgggcgtccgccgggcggcagggggtggagggggcggtaaatcagtaacccgcagtgcacacagggccttttgtcccgctccgtccaaagagcaccccggccgcggagctggttactcattgcccaccgaggcgggggcaggctggccctgtgcagctaccctcgggacccattgattcgcacctccccccaggctggcccggcaagggtgggggaggacaagcgcgcttgtccctgcggctgtcttcgcgccggcggcagagatgagggacctgaggccccgaaaagttcagtcacttagtgcccgggggcctccagcgcgagtgcgggaggctgaaggagaacccaggactgtctgatgcctaaggcaggccctccattcccacgtggggggtggtcggtcagcggtcagcagccacgggtgactcgactaaggactctgatatcagggcagcctggggtaggaataaactccccgggcctccccacccactcccagcccaagctgtgtacccaaagagctgccctccctgccaagccgagcttggtagggagttttaccaaggaggatccgactggattcgagagttgaggtgggccagagacagcagtatctgagtcaggtagagaagagcaatgaggggcacagagggatgggcaagagagcacatgtgcccagttttgaaagccaatggcttcagcgctcctgaaggggcagacggtgtgaccaaagagataggcagcggcagagagggagccctaggatgttgagctggatcctgctgggcacaggtagccattaagggcttgcaagctggggggcatgacatggcagacttgcaggtttttttgtttgtttttttattttattttatttttttattttgttttttttgagacggagtctcactctgtcgcccaggctggagtgcagtggcgcgatctcggctcactgcaagctccgcctcccgggttcgcgccattctcctgcctcagcctcccgagtagctgggactacaggcgcccgccaccgcgcccggctaattttttgtatttttagtagagacggggtttcaccgtgttagccaggatgttctcgatctcctgacctcgtgatccgcccacctcggcctcccaaagtgctgggattacaggtgtgaaccatcgcgcccagccgacttgtagttttttaaaactctgctggaagatgaaggttgaagagccgagggagaggatgtttccagaggcccatgcaagagatggccatgacctgccttgagaaggggcaggggaagccagatggactggaagtggagtggcagtgaccaaggaggaggaggtgtgataggcttcccacgcagggtagatccagagacaccagtgccacccataggcccctaggactgcagtggtcacccgattcctttgtcccagctgagactcagttctgagtgttctattttggggaacagaggcgtccttggtagcatttggaagaggatagccagctggggtgtgtgtacatcacagcctgacagtaacagcatccgaaccagaggtgactggctaagggcagacccagggcaacaggttaaccgttctagggccgggcacagggaggagaacattccaacactctgtgtgcccagtgccgacgcacgttctctcttttatcctcaaaacagtcctatgaggatataagccagagagagacagagacaaggaattacaagttggtgagagtcaggatttgaacttggctctggcagatggaaaattagggtctgtattctttacaaaaccgtgtgtgcctcagatggagttggtgcataacaagcagaggtatccagggtcgcggtcctgcttgccacggaaggggccgccttgtcagttgtgaccacccagccctggaaatgtcagtaatgctgtaaggagtggggatcggatcagatgccatccagatgctgaagtttgaccttgtgtcatttttcactttcttttttggctcttctgcaatcaattcatttatttagcaaaaaagaaattatgtgtgccgagagcatgcagaagatatgtctccgttctctgcttccctccaaaaaagaatcccaaaactgctttctgtgaacgtgtgccagggtcccagcaggactcagggagagcaggaagcccagcccagaccccttgcacaacctaccgtggggaggccttaggctctggctactacagagctggttccagtctgcactgccacagcctggccagggacttggacacatctgctggccacttcctgtctcagtttccttatctgcaaaataagggaaaagcccccacaaaggtgcacgtgtagcaggagctcttttccctccctattttaggaaggcagttggtgggaagtccagcttgggtccctgagagctgtgagaaggagatgcggctgctgctggccctgttgggggtcctgctgagtgtgcctgggcctccagtcttgtccctggaggcctctgaggaagtggagcttggtatggcttctgaggtgggagagggtggcaggggtgggaagagtgggcaccaggagggggctgctgggctgagcaaagctggaaaggatccttgcccaggccctgagaaggtggcggcagggcagggctcaaccactgagactcagtcagtgcctggcttccagcaagcattcatctatcactgtgtctgcgagagaggactggccttgcagggcgcagggccctaagctgggctgcagagctggtggtgagctccttgcctgggtgtgtgtgcgtgtgtgtgtgtgttctgtgcactgggtgtgtgacctaggaggtccaggcagcatgtgtggtataagcattatgagggtgatatgccccggtgcagcatgaccctgtatgtggcaccaacagcatgtgccttgtgtgtgtgtgtgtccgtatgtgtgtgtgtgtatgcgtgtgtgtgtgtgtgtgtgtgtgtcttggccactgtcatgtgcactaaatgctgtgtgtgtgacatgccccaagagtgtggcatttgccctgggtgtggcatccgcagcatgtggctgtgtgggtgtcaaggagtggtggctccttcagcatgcgttgcgaagtgcttgtgccctgcatgtgcggtgtgttctctgtacacaggaggctgcctcagatggggctgcggggtctgctgacctctgccctctgcccacagagccctgcctggctcccagcctggagcagcaagagcaggagctgacagtagcccttgggcagcctgtgcggctgtgctgtgggcgggctgagcgtggtggccactggtacaaggagggcagtcgcctggcacctgctggccgtgtacggggctggaggggccgcctagagattgccagcttcctacctgaggatgctggccgctacctctgcctggcacgaggctccatgatcgtcctgcagaatctcaccttgattacaggtggtaagagactctagcagggagtgaagggatgcctggggagacagacctgcccctcttggaccttagatgcttccctctgtccctgatgtagactccttgacctccagcaacgatgatgaggaccccaagtcccatagggacctctcgaataggcacagttacccccagcaaggtcagtaggtctccaaggacttgtgtccccgctgctgctcatctgatcactgagaagaggaggcctgtgtgggaacacacggtcattctaggggccttcccctgccctccagcaccctactggacacacccccagcgcatggagaagaaactgcatgcagtacctgcggggaacaccgtcaagttccgctgtccagctgcaggcaaccccacgcccaccatccgctggcttaaggatggacaggcctttcatggggagaaccgcattggaggcattcgggtgagtctctgggttccaagaccgtctgctcccccattttcattccttcatcagtcccctcatacctacaagcatacctataaatcaatcgaatgagtgaagcgattgcggggccccggaaggagccctggactgtggacctgggcagctctggttccccttctgctactctctggcaagtgacttaacctctcagcctcagcaactccctttgtaaagggagaagaatcactgactggttggtctgcataagccttagcatctcatcgtcttgatgagaccctgcagggtcggctccatgctgtcatgaggcaactgagcctcagagaaggcaagggttggctcaaagtagcacagctagggagagggagagctaaaattccaaaggctcaaacccaaggctcaagcgccctggggagcctactcctttgtgccatagtccttggcctgggcctgatgttctcagggcctagagagcttgacaagagccctgtgggcaggatgaggatctagcctcctggtcctctggcccccttggtggacatggtccggtggtcccggacactctctctgcctgcagctgcgccatcagcactggagtctcgtgatggagagcgtggtgccctcggaccgcggcacatacacctgcctggtagagaacgctgtgggcagcatccgttataactacctgctagatgtgctgggtgagcgcggggctgggaacaggggaggcctgacccattttgggctcagttgtgccctcttggtggggtctagtctggcaggcaggatggactcagatgagtcaggcagcttggtgagcaggtgggtcaggggaaagcacaggggttagtgtggggctggaggagcagaggtctgccaagaggaaaaacaagaaggacatccaggcagagggcgcagcccgagcggagggcctgagtataacaaacgccctgcacttgcaggccagcatattcgtagggcgtggcgtttatatggggagccaggtggtggagggttttgaatgctaggctgagatgttgtccttgacccgaagcaatagggagccagggaaggtttaagcagggtaagcaggagacagacaagaagctgcagaaaggtccctcccttgaacttgaggaaggctggagggaggcaaacagggtgcttctatgggtgccagtggtcagggttgactgtctcgcccggtccccagagcggtccccgcaccggcccatcctgcaggccgggctcccggccaacaccacagccgtggtgggcagcgacgtggagctgctgtgcaaggtgtacagcgatgcccagccccacatccagtggctgaagcacatcgtcatcaacggcagcagcttcggagccgacggtttcccctatgtgcaagtcctaaaggtaaaaggtgcaccctgctgcagcctgggccccattcttctcccaccttgggttggggggctccccagcttccctgttggccacagtgtggccccaggccctgctgtgaccccagagcatgtcccccaccccagactgcagacatcaatagctcagaggtggaggtcctgtacctgcggaacgtgtcagccgaggacgcaggcgagtacacctgcctcgcaggcaattccatcggcctctcctaccagtctgcctggctcacggtgctgccaggtgagcacctgaagggccaggagatgctgcgagatgcccctctgggccagcagtgggggctgtggcctgttgggtggtcagtctctgttggcctgtggggtctggcctggggggcagtgtgtggatttgtgggtttgagctgtatgacagcccctctgtgcctctccacacgtggccgtccatgtgaccgtctgctgaggtgtgggtgcctgggactgggcataactacagcttcctccgtgtgtgtccccacatatgttgggagctgggagggactgagttagggtgcacggggcggccagtctcaccactgaccagtttgtctgtctgtgtgtgtccatgtgcgagggcagaggaggaccccacatggaccgcagcagcgcccgaggccaggtatacggacatcatcctgtacgcgtcgggctccctggccttggctgtgctcctgctgctggccgggctgtatcgagggcaggcgctccacggccggcacccccgcccgcccgccactgtgcagaagctctcccgcttccctctggcccgacaggtactgggcgcatcccccacctcacatgtgacagcctgactccagcaggcagaaccaagtctcccactttgcagttctccctggagtcaggctcttccggcaagtcaagctcatccctggtacgaggcgtgcgtctctcctccagcggccccgccttgctcgccggcctcgtgagtctagatctacctctcgacccactatgggagttcccccgggacaggtgcgctgagctgtgtgggggcagggacgcgggcgccgggttgcagcccgccctccgcaggagtgactcggaggtctgaggctggactttctccatctccaggctggtgcttgggaagcccctaggcgagggctgctttggccaggtagtacgtgcagaggcctttggcatggaccctgcccggcctgaccaagccagcactgtggccgtcaagatgctcaaaggtgagtgtggcccggtgtggtggctcacacctgtaacgccagcactttaggaggctgagggtgggaggatcgcttgaatccaggaattcgaggccagcctgggcaacatggcaagacttcatctctacaaaaaaaaaataagaaaattagttgggtgtggtggtgtgtgcctttagtctcagttactagggaggctgaggcaggaggatcccttgaatccaggagttggaggttgcagggagccatgatcacgccactgtattccagcctgggcaacacagtgagaccctatctgaaaaaataaataaataaataaaaataaaaggtgaacgtggcagcctggaggaggtgctatggcattgggactaatagaaggggctcacggtgccaccaggtgagccctggagctgggagaggctgtgggatcccacccttaaacctgcaattcacctctgctcctgaccctggcaagtgacttctgagcctcagttttcccttgtgtcatatggggtagataacagtccctactcccagcccaaggattgtggaaagtgcctggctcatagtcagggctcaataaatcttcaccactggggtgatgatgatgagaagaatttggtgtgacaggcttgatatcctgtgtcagcattagtctgtgtcagctttgacttcacatctccttgtcagcctcacaggccctctacctccttccttatggttccccccagacacaccctcagcctcccttggaccctccctaggtctgccccccacgtccactgctgtaggaggacagcccttctgcttgcacccaggcccagccccggggtgctcttgctgggcactcctgcaccccacccatcagggcctctccttgcagttccccagccccctctgcaagaatggcctccactgctcttctgctcctcccctcctctctacacagctggggccacctggtgctccctgggaggcagggattgagaaatgcacattgtgtcattggcccagggccacaggtcagccccaggggctcagccagagaagccaaagcagccttcttcccaagctccccggctgcacccggcctgccgccagctccctgaattcccaggccagttggaagccaggccctggtcaaacagaccccagggcgccagcctgctttccgcacccagaagctctgaccccatgcggggactaccgctgacccctccagcggcagcttccttccttccttcctgctccgagctcttcccctctctcctgtgtcctgggcctgcccgctggaaggcctgcctcttagatccttgatacagttgcatccttgcaactgctgtgacaggcagggtgtgacccactgctctgtttcccacaagacgaacctgaggttcagagacgctaggagactttttcaaggccacacagcctagcaaggattcagccctagacctacgtagccctggtccagtgctgcttgtcctgcacctgcctctgcatgctccctcgtgcagttggagggcagcctcttcaccccgtctgctgcccttacagacaacgcctctgacaaggacctggccgacctggtctcggagatggaggtgatgaagctgatcggccgacacaagaacatcatcaacctgcttggtgtctgcacccaggaaggtggggccgaggcggggctggctgcacgggccgttagggtgcagagccaaagctttggcagcctctccacgctccctccactccctctgcagggcccctgtacgtgatcgtggagtgcgccgccaagggaaacctgcgggagttcctgcgggcccggcgccccccaggccccgacctcagccccgacggtcctcggagcagtgaggggccgctctccttcccagtcctggtctcctgcgcctaccaggtggcccgaggcatgcagtatctggagtcccggaaggtataggcgctagggctctgagcccctctcagtctctccagctccactctcaggcctgtggcattcaatgtcccgacttctccctctctgctctttttcatgaccccacctcagtgtccccaggcattcacgctttcctgcattccccactcgttcctcacccttccccagaggggagaggggacgcaggagaaggcactccccgtttctaaaccttgacctcctcctctgtaaagtgggtggagggcccctgcccccgggcctgctggggggtggtgtgtgctcaactccaggccaggtgtcctgaggcacccaagcccccgctccctgcagtgtatccaccgggacctggctgcccgcaatgtgctggtgactgaggacaatgtgatgaagattgctgactttgggctggcccgcggcgtccaccacattgactactataagaaaaccagcaacgtgagggagatggggcagaactggatgggggtggaggggcactgggcccggggtggcaggcacgaggacctgtgggactctgcactgaggccctctctcccctccagggccgcctgcctgtgaagtggatggcgcccgaggccttgtttgaccgggtgtacacacaccagagtgacgtgtgagtcctgccggcggtcactgtcctaccccacaaaaagggcaaggcactgcccaaagtcacgtggccccaggagtcatgcgctcgagggctccttcagatttggtctgggacccgagtgggcccagactccaggaggagcccattccccaacagctgtggtgggtcatgtctgtggggtcccccgtcctagccccggtcgtagggagggcgctgagccacactgagccctggccctgcctccaggtggtcttttgggatcctgctatgggagatcttcaccctcgggggctccccgtatcctggcatcccggtggaggagctgttctcgctgctgcgggagggacatcggatggaccgacccccacactgccccccagagctgtgaggcctcaccctgccctcgaccccactttccagtcctcctcctcctctgccctgaccatggcctcagggtgtgtcccggccagaaggacaacactaacaacaactcctcgtcctcctcctcctcttcctcttcctcctcctcctcttcctcctcctcctcttcctcctcctcttcctcctcctcctcttcctcctcctcctcttcctccttctcctcctgctcctcttcctcctccttctcttcctcctcctcctcttcctcctcctcctcttcctcctcctcctcttcctcctcctcctcttcctcctcctcctcttcctccttctcctcctgctcctcttcctcctcctcctcttcctcctcctcctcctcctcctcttcctcctcctcagcctagtggagtgtcctggcctggcttctactgatgaccctcctatccctcatcaaactccccaccaaactcctccccacccagagaacccccggtcctccccttcctcctgaaggcctgaggctccctgtgaccctccgccccacctctcgcaggtacgggctgatgcgtgagtgctggcacgcagcgccctcccagaggcctaccttcaagcagctggtggaggcgctggacaaggtcctgctggccgtctctgaggaggtacagcccctcccacccaccacctccctctgcctgctcccctccaggcctcatctggcctgaccgcgtggacatgcgccccgtcccatcccgggcgctgcagaggctgaccagctccgttccccacagtacctcgacctccgcctgaccttcggaccctattccccctctggtggggacgccagcagcacctgctcctccagcgattctgtcttcagccacgaccccctgccattgggatccagctccttccccttcgggtctggggtgcagacatgagcaaggctcaaggctgtgcaggcacataggctggtggccttgggccttggggctcagccacagcctgacacagtgctcgaccttgatagcatggggcccctggcccagagttgctgtgccgtgtccaagggccgtgcccttgcccttggagctgccgtgcctgtgtcctgatggcccaaatgtcagggttctgctcggcttcttggaccttggcgcttagtccccatcccgggtttggctgagcctggctggagagctgctatgctaaacctcctgcctcccaataccagcaggaggttctgggcctctgaaccccctttccccacacctccccctgctgctgctgccccagcgtcttgacgggagcattggcccctgagcccagagaagctggaagcctgccgaaaacaggagcaaatggcgttttataaattatttttttgaaataaagctctgtgtgcctgggtcttccctgagcaacatggagtggggtgaggtggagggatccctccagcagagttctgcctacaggacacggactgagggcactggaccaggccatgggctccgccacctccactgccccaggagccagtgtgtgcctatctgggtccgcctgtcccaccagccccatcttgtgtctgcgacagtgtgaatgagtattaatgggctgagtccgcattgcactatacacggtgggactcctgtaccctctgcacatgtgtgtgtgtgcatgtgtgccctgcagctgtccccaagggagctggcagcccccctcccccatctgctcagcattaaccaagctgaccgttaacacagcatgaaaatctgagagccagccttaggccgcggcccgctcccacgctctgccggctcaggctgggggcttgtggaggccatgcccgccccgccctggccagtctcccgggcagcagctggttgccgcccgcctgggctgcagctgtccctgcctgcctggtcttccactgaggagccgtcacagccctgtactcagagctcctcagagtgagcagcttctcaaggctctgagcctggaacctccttccctggccccatcctggcacgtactgctactccccagcccctgagccttgagtgggccatggggggcccaggcatggtgtctgacccagcacttggcactctcctgtccttttccttacaggcctcaggctgggacaggactgcccaaccaggacagccttcatggaggccatcgggattgcccccgtctgcccccagggagtggtggctgaaaatgcatatgcggtcagaggggtcagacagagggattggaggctggggcctccttggaagactgagcgtcagctcatgattgtttatcctcactctgggctcctcccagctctcagcatagcctctccagctgacggtatcccacacagaactcatcttacccccagaactgtacctcctccagggcaggaaccagggagtcacctgactacttccctcaagaaccctgttccaggccaggtgcggcagctcacccctgtaatcccagcactttgggagaccgaggcgggcggatcacctgaggtcaagaattcaagaccattctggacaacatggcaaaaccctgtctctactaaaaaatacaaaaattagccgggcatagtggggcacacctgtagtcccagctactcaggaggctgaggcaggagaatcatttgaatctgggaggcgagggttgcagtgaaccgagatcgtgccagcctgggctagggagcaaggctctgtcgcaaaaaaaaaaaaaaaacaaccctattccctcatgcgcttccacggtccagcgtggctcctgaggccagcactgccacctctctgataatactgtctttgcccatgagtagggtgcacctgtcccgcctgcctcctggggcgtagggtttaggaggaagcacgtgcagatgcacataggcttgggggagggtgtgatgcggaggcccatgggttgggctgcggtgcttccctgggagccggtgctggggcttttgtgtccctgagtgcccccctccgagccctaggtatccagcctcccttttgctccctcccctgcaggtggctccagaggtagcttccaaaagcagactgggtttatgctccctcctgctctcaaagacccccactaactcccgaaagcccccagactgaccaactttctttttccttccttccttccttcttttcttccttccttccttccttcttccctccctctctctctttctttctttttctctttcttttccttccttcctttcctttccttttgctccttccctcccctctctgtcttcctttctctctttctctctctcctccctccctccctccctcccttccttccttcctctctctctctccctctctttttctctctcttctttctttctttctctctctttctttctttttctttttttttttttgagacaaggtcttgatctgttgcccggattggagtgcagtaatgccatggtcatggctctgctgcctcaaactcctgggctcaagcaaccctcccacctcagcctgccaagtgtgtaggactacaggtgcatgccaccatacatggataattattttttagtttttgtagagatggggttttgctatgttgtccaagctggtctcaaactcctggcctcaagcaatcctcccaccttggcctcccaaggttcccaagccactggacattctgactgagcccctctctccaatgtatagcctcccattggggggtcactgtccactgactgtgtccgcctgtccagccaatcacaggagaagcagatcccttggacctgaccttgggaaggagaggactgggagattagaatcgtgtgtgaggacagtattctaaggggatgtggaacaacagccccattttccaatttcccaccatgagcctgctgcggtgccaggctcaaccaaccacgctctcccctgccacagccttgccaaataaagattgttcttcccatttaacgatggagaaactgaggtccagggtcacaagaatggggctccaggaaggagctaggctgaaccccaggttcccagaaggccatgtgcacattggagaccagacccaggtcactcagagtgacaggggcagctgctgcctggtgggtcctgggggccgggaggggctcagctgcccaccctgcaccccctccctgccagcgtccctggcaggcacacgcttcctggggccattccacattcctgatgtcccatgtcagaatgacacatatactgctaattcccctatgcgagctctgatgctccagctctctgccctcccctccccgctcccggcagcatggcagcagctggggcctggcctccctggtctgcctgggttctagcctgtgacagggacccatagaaaaagcactgaggccgggccaggcacagtggctcacgcctgtaatcccagcactttgggaggctgaggtggatggatcacgaggtcaggagatcgagaccatcccggctaacatggtgaaaccccgtctctactaaaaatacaaaaaattagccgggcatggtgggtgcctgtagtcccagctacttgggaggctgaggcaggagaatggcatgaacccaggaggcggagcttgcagtgagcggagatggcaccactgcactccagcctggacgacagagcaagactccggctcaagagaaaaaaaaaaaaagaaagaaaagaaagcactgaggacaggcacagtggctcacccctgaaatctcaacactttgggaggctgaggcaggcggatcacccgaggtcaggagttcgagaccagcctggccaacatggtgaaaccctgactctactgaaaatacaaaaattagccgggcgtggtggcgggcacctgtagtctcagctacttgggtggctgaggcaggagaatcgcttgaacctgggaagtggaggttgcagtgacccaagattgcaccactgtgctccagcctgggtgacagagggagactccgtcccaaaagaaaaaaaaagaaggccgggagaggtggctcatgcctgtaatcccagcctttgggtagccgagccggccggatcacctaaagtcaagagttccagaccagcctgcccaacatggtgaaaccctgtctctactaaaaatacaaaaattagccgggcgtggtggtgggcgcctgtaatcccagctacttgggaggctgacacagaagaatcacttgaatccgggaggcggaggttgcagtgagccgagattgagccactgcactccagcctgggcaacaagagcgaaactccatctcaaaaaagaaaagaaaaagcactgagcccacctctgcactctgcctcttgctggctgtgtacataaggcagggttctggtggcatcaagacagtgactctgacttgggaagccctagccaagggatggaggctgctggctggggagtcagcacctgggagggagggggaggcgcacggtggaggggaggggctgcaggctgagtagcctccatttgagatgcttgggaccagaagtgtttcagatttcagatttttcagagtttgtaatcttagaaacaggacctacatctaaacacaaaattcatgtttcatatacaaaatgtttctaattcaaaatttatgtttcacatacaccttgtatacataacctaaaggtaattttatacaatattttaaataattttgagcatgaaacaaagtttgtgtatactgaaccatcagcacagtagggggccgggcgtggcggctcacacctataatcccagcactttgggaggccaaagccggtgaatcacctgagctcaggggttcaagaccagcctgagcaaaatggtgaaacccccatctctacaaaaaaatacaaaaattggccagccaggcacagtggctcacgcctgtaatcccagcagtttggtaggccgaggcaggtggatcacctgaggtcaggagtttgagaccaacccagccaacatggtgaaaacccatctctactaaaaatacaaaaattagctgggcatggtggcgcgcccctgtaatcctagctacttgggaggctgaggtggaagaattgcttgaacccaggaggtagaggctgcagtgagcggagatcacaccattgcactccagcctgggtgacagagagagactccatctcaaaaaaaaaacaaaaacaaaaacaaaaattagccgagcatggtggtggttgcctgtaattccagctactcgggaggctgaggcaggaacattgattgagccaggaggttgcactgagccaagactgcgccattgcactcagcctgggtgacagagtgagagcttgtctcaaaaaaaaaaaaaaaagccaggtacggtggctcatgcctgtgatcctagcactttgggaggctgagacaggaggatcacttgagcccaggagtttgagaccagcctggacaacgtggcaaaaccccatctccacaaaaaataaaaaagtagccgggtgtggtggtgcacacttgtagtctcagctacttgggaggctgagggaggatcatttgagccgaggagttcgaggctgcagtaagctatgattgctccactgcactccagcctggacaatagagaaagactccgtctcaaaaaaaaaaaagaaagaaagaaagaaaagaaacgaaaagcaaatatgtcaggtgtggaattttccactgtggcatcatgtcagtgctcaaaaagtttcagattttggaccatttcaggtttcagatttttgaattagggatgctcaacctgtatgaccaaaattactctctctgagcctcctttttccaaccagtcacataggaatgatgacacccacctcagagcatggtttctactgctctgtaaacaacagctgttgctgcacagagatcaggaaggaatggcttccaggggtggattactgtgcaggtgccatgatctcatttccttctcctggcagcccttccacaaaggcattcttgccccattttccagatgtggacactgaggctctgaaggtggaagtgactggcccagggtcacagggggggaaagtgagaaagttgttgctcagggccaggtgccctgcctgtcccacggaagagcccactcccacagcctagtcagcccggcagttctgagggtcaggagaggctctgggtgtgcatgaagcaggggatgtctgtgactgagatgtgcacacacaggggtggatggacagtcaccacacccaagcacagaggtgcctgtctcagtgctcctgcctccagccccatggcattcggtccctgccccttcagtcccctcccatgggccactccttcctggggacactcttcctaccacctcccggggacacacttcctaccgcctcccacgtggctgagacccacttgcccttcagatgtcactcaagcctcaattcttgggcagcctcctcaggtcctccattccaggtcggcttccaggctgggccccattcacaggctctggcggctgtctctgtagtagagggatgctctgaatagtctccttcccccagactgtgagcaccaagacgcaagttctgctttggttgtgttttgttgttgtttttgtttttgttttttgagacggagtttcactcttgtcacccaggctggagtgcaatggcatgatcttggctcactacaacctccgcctcccaggttcaagcgattcttctgcgtcagcctcccaagtagctgggattacaggcatgcaccaccatgcctgggagacgaggtttctccacgttggtcaggctggtctcgaactcacaacctcaggtgatctgccctcctcggcctcccaaagtgttgggattacaggcgtgagccaccgcacctggcttggttgtgttttttaaatcagtagctctgaagatgtagcagatgtcagagttatctagtgggcttgtatgctggacaccctaccccccagaattgtgtatttagtgggtctggggtggaatctgggaatttgcattgctacccagatgctgctggtctggggaaggagtgggggtcacactttgagaactatcgtttagtttagttttgttttttgagataaagtctcagattctctcgtctcagcctcccgagtagctgggattacaggcgtgcgctaccacgcccagctaatttttgaatttttagtaaagacagggctccactgtgttggccaggctggtctcgaactcctgacctcaagtaatctgcctgcctcggctttagttttgttttgttttgagacagagtctcactctgttgcccaggctggagtgcagtggcgcaatctcagctcactgaaacctctgcctcctggtttcaagcgattctcctgcctcagcctcccaagtagctgggattacaggtgtgtgccaccatgtctggctaaattttgtatttttagtagagatggggtttcaccatgttggccaggctggtgtcaaactcctgacctcaggtgatccacccgcctcggcctcctaaagtgctgggatcacaggcatgagccaccttgcctggccgagaaccacagttttaaagaagtcaataaatgtacctagtttcaacaattaaaaagcaattccaatggtacagaaaggttttcactgaaaagcaactccccccaccccctgctctcactgtctccctccccagcagaaaccgccatcatttcctgggtctccttgcacggcccccatcgcatgctgtgtggccctcaatccagttcagctgttaccagtcttgctcctccccgcaaaatccccacccaggtcaacgcctggtagaactggggtgcagcaaagtgtttgctgaatgaagggaagaaggagacccattcccaggtccaggcacagtcaggtgtgtacagtccaccccgtactgcccaccccttcccacattccccgggccctaactggggaccccccacccctccgcctgctgtgggatttggcctaatcctggaggatgagtgtggggcagctgcagctcccactgcggggagagtgcttccctctggaggaaatatcctttttactctcttgctatcgaaatttgaccttcgtcggcacctgggccccacggctggggcccgtccctgagaagtggttgaggagggggcgtgaaatcgccaacagctgaactcacccagctttccccacatcctctccatccctgccactgctcacattccacagcgccagccctttccggggcccccagtgccagcctcacgttctcgcgctggtactcgggggcgcagcctgacatggccctattgacctcaccaccggcccaaggcacatgctgtgggctccttgtagttctggagcctccaggcccccctggaacccttcaggactcctaagtggactcattgggaactgtctccgccttacactgctaagtggaaaattcgaggcacgggcagtgtgtggcgtgcgcctgcatcggtgtgaactgtgaacctgagtttgcaggaatgcaaccgcttggggatggcaagcaggcacaatagttggttcccttcccaggaggggaagtaggtggctggggtgagggcaggaaaggaccttacactgtatatgcctttgtttcctttgatttttgtacctggtacatgtattacctatcacaaagaggaaaaatgtttccaaaaagagaaatgaaaagaggctgggcacagtgactcacacctgtaatcccagcactttgggaggccaaggcgggaggatcacgaggttaggagatcaagaccatcttggccaacatggtgaaaccctgtctatactaaaaatacaaaacttacctgagtgtggtggcacgtgcctgtaatcccagctactcaggaggctgaggcaggagaatcgcttgaacccaggaggcggagattgcagtgagctgagattacgccactgcactccagcctggtgacagagcgagagactccgtctcaaaaaaaaaaaggctgggcgcggtggctcacgcctgtaatcccagcactttgggaggccgaggtgggtggatcacgaggtcaggagatcgagaccatcctggctaacacggtgaaacgctgtctctactaaaaatacaaaaaattagccgggcgtggtggcgggcgcctgtagtcccagctactcaggaggctgaggcaggagaatggtgtgaacccgggaggcggagcttgcagtgagccgagatcgcgccactgcactccagcctgggtgacagatcagactccatctcaaaaaaaaaaaaaaaagagagagagaaaaatgaaaagaaaaaaacattaaggaagaaaagtattccctctgggtacagaacagttgccagagctgcctggcccaaagcttcggccaccccagagccagttcacaaactccagggcccagtaccctcctaggcagtcacattcaggccaaaccatcctgctgcccacgtcacacagcagcccaagcccaaatagagaaccacctgacacagcctgaatgggtccctgaccactgccaagctccttactcgcccctcccctgtctagcctccagccccatgacctttctgtgtctcccttgtcccaagcccactagcaccccagggcatttgcactggccactatcttcacctggctcttctggctctcagactaaaagtcagctcctaagattggcctcccctgatcaccctggccaaagtcctctctctgttattccatattttagacgtttgttttctttgcaatgatcttatttgttcactctttactggctcccaccaaaaggtgagctctgagaagccaagggctgcgccgccaatgtctacaatggtgtctgcctaatagtccgtgctccatagacgttcatggaaaaaagacatgttgaataaatttcccaaattcagaattcaaatcccaggctgctgagctgatctcagagaggctccaaaaaactctcaggacctgagacaatgctcccaaaatatccatgttgcctcctgaggggactgcaaccatgagccccagagtgtctgtagggggtccggcaaccccttctcatcctctgacccggtggcccagccctgatgtcaggatggagtcgcagggacagctcgggactgttactgcccttgagggacctccaggctgggggtgtctgcttataaaccaggattccccaatactgtgtgggggacaacatgggagacaagggaccaatatctaaggaactcctgcaactccgaaagaagacgggcaccccgaaacacaaataaggacagtgtgcaaccaggtaattgactgaggaggagacccagaggctaagaagcactggaggagatctggagactcgagaataatcttaggtgtgctctca

SEQ ID NO: 3487 - DNA, 2981 bp, Homo sapiens
gcggggcgggacaggaggtgggccgctcgcggccacgccgccgtcgcgggtacattcctcgctcccggccgaggagcgctcgggctgtctgcggaccctgccgcgtgcaggggtcgcggccggctggagctgggagtgaggcggcggaggagccaggtgaggaggagccaggaaggcagttggtgggaagtccagcttgggtccctgagagctgtgagaaggagatgcggctgctgctggccctgttgggggtcctgctgagtgtgcctgggcctccagtcttgtccctggaggcctctgaggaagtggagcttgagccctgcctggctcccagcctggagcagcaagagcaggagctgacagtagcccttgggcagcctgtgcggctgtgctgtgggcgggctgagcgtggtggccactggtacaaggagggcagtcgcctggcacctgctggccgtgtacggggctggaggggccgcctagagattgccagcttcctacctgaggatgctggccgctacctctgcctggcacgaggctccatgatcgtcctgcagaatctcaccttgattacaggtgactccttgacctccagcaacgatgatgaggaccccaagtcccatagggacctctcgaataggcacagttacccccagcaagcaccctactggacacacccccagcgcatggagaagaaactgcatgcagtacctgcggggaacaccgtcaagttccgctgtccagctgcaggcaaccccacgcccaccatccgctggcttaaggatggacaggcctttcatggggagaaccgcattggaggcattcggctgcgccatcagcactggagtctcgtgatggagagcgtggtgccctcggaccgcggcacatacacctgcctggtagagaacgctgtgggcagcatccgttataactacctgctagatgtgctggagcggtccccgcaccggcccatcctgcaggccgggctcccggccaacaccacagccgtggtgggcagcgacgtggagctgctgtgcaaggtgtacagcgatgcccagccccacatccagtggctgaagcacatcgtcatcaacggcagcagcttcggagccgacggtttcccctatgtgcaagtcctaaagactgcagacatcaatagctcagaggtggaggtcctgtacctgcggaacgtgtcagccgaggacgcaggcgagtacacctgcctcgcaggcaattccatcggcctctcctaccagtctgcctggctcacggtgctgccaggtactgggcgcatcccccacctcacatgtgacagcctgactccagcaggcagaaccaagtctcccactttgcagttctccctggagtcaggctcttccggcaagtcaagctcatccctggtacgaggcgtgcgtctctcctccagcggccccgccttgctcgccggcctcgtgagtctagatctacctctcgacccactatgggagttcccccgggacaggctggtgcttgggaagcccctaggcgagggctgctttggccaggtagtacgtgcagaggcctttggcatggaccctgcccggcctgaccaagccagcactgtggccgtcaagatgctcaaagacaacgcctctgacaaggacctggccgacctggtctcggagatggaggtgatgaagctgatcggccgacacaagaacatcatcaacctgcttggtgtctgcacccaggaagggcccctgtacgtgatcgtggagtgcgccgccaagggaaacctgcgggagttcctgcgggcccggcgccccccaggccccgacctcagccccgacggtcctcggagcagtgaggggccgctctccttcccagtcctggtctcctgcgcctaccaggtggcccgaggcatgcagtatctggagtcccggaagtgtatccaccgggacctggctgcccgcaatgtgctggtgactgaggacaatgtgatgaagattgctgactttgggctggcccgcggcgtccaccacattgactactataagaaaaccagcaacggccgcctgcctgtgaagtggatggcgcccgaggccttgtttgaccgggtgtacacacaccagagtgacgtgtggtcttttgggatcctgctatgggagatcttcaccctcgggggctccccgtatcctggcatcccggtggaggagctgttctcgctgctgcgggagggacatcggatggaccgacccccacactgccccccagagctgtacgggctgatgcgtgagtgctggcacgcagcgccctcccagaggcctaccttcaagcagctggtggaggcgctggacaaggtcctgctggccgtctctgaggagtacctcgacctccgcctgaccttcggaccctattccccctctggtggggacgccagcagcacctgctcctccagcgattctgtcttcagccacgaccccctgccattgggatccagctccttccccttcgggtctggggtgcagacatgagcaaggctcaaggctgtgcaggcacataggctggtggccttgggccttggggctcagccacagcctgacacagtgctcgaccttgatagcatggggcccctggcccagagttgctgtgccgtgtccaagggccgtgcccttgcccttggagctgccgtgcctgtgtcctgatggcccaaatgtcagggttctgctcggcttcttggaccttggcgcttagtccccatcccgggtttggctgagcctggctggagagctgctatgctaaacctcctgcctcccaataccagcaggaggttctgggcctctgaaccccctttccccacacctccccctgctgctgctgccccagcgtcttgacgggagcattggcccctgagcccagagaagctggaagcctgccgaaaacaggagcaaatggcgttttataaattatttttttgaaataaagctctgtgtgcctgggtc

SEQ ID NO: 3488 - protein, 754 aa, Homo sapiens
MRLLLALLGVLLSVPGPPVLSLEASEEVELEPCLAPSLEQQEQELTVGQPVRLCCGRAERGGHWYKEGSRLAPAGRVRGWRGRLEIASFLPEDAGRYLCLRSMIVLQNLTLITGDSLTSSNDDEDPKSHRDLSNRHSYPQQAPYWTHPQRMEKKLHAVPAGNTVKFRCPAAGNPTPTIRWLKDGQAFHGENRIGGIRLRHQHWSLVMESVVPSDRGTYTCLVENAVGSIRYNYLLDVLERSPHRPILQAGLPANTTAVVGSDVELLCKVYSDAQPHIQWLKHIVINGSSFGADGFPYVQVLKTADINSSEVEVLYLRNVSAEDAGEYTCLAGNSIGLSYQSAWLTVLPGTGRIPHLTCDSLTPAGRTKSPTLQFSLESGSSGKSSSSLVRGVRLSSSGPALLAGLVSLDLPLDPLWEFPRDRLVLGKPLGEGCFGQVVRAEAFGMDPARPDQASTVAVKMLKDNASDKDLADLVSEMEVMKLIGRHKNIINLLGVCTQEGPLYVIVECAAKGNLREFLRARRPPGPDLSPDGPRSSEGPLSFPVLVSCAYQVRMQYLESRKCIHRDLAARNVLVTEDNVMKIADFGLRVHHIDYYKKTSNGRLPVKWMAPEALFDRVYTHQSDVWSFGILLWEIFTLGGSPYPGIPVEELFSLLREGHRMDRPPHCPPELYGLMRECWHAAPSQRPTFKQLVEALDKVLLAVSEEYLDLRLTFGPYSPSGGDASSTCSSSDSVFSHDPLPLGSSSFPFGSGVQT

SEQ ID NO: 3489 - DNA, 3101 bp, Homo sapiens
gcggggcgggacaggaggtgggccgctcgcggccacgccgccgtcgcgggtacattcctcgctcccggccgaggagcgctcgggctgtctgcggaccctgccgcgtgcaggggtcgcggccggctggagctgggagtgaggcggcggaggagccaggtgaggaggagccaggaaggcagttggtgggaagtccagcttgggtccctgagagctgtgagaaggagatgcggctgctgctggccctgttgggggtcctgctgagtgtgcctgggcctccagtcttgtccctggaggcctctgaggaagtggagcttgagccctgcctggctcccagcctggagcagcaagagcaggagctgacagtagcccttgggcagcctgtgcggctgtgctgtgggcgggctgagcgtggtggccactggtacaaggagggcagtcgcctggcacctgctggccgtgtacggggctggaggggccgcctagagattgccagcttcctacctgaggatgctggccgctacctctgcctggcacgaggctccatgatcgtcctgcagaatctcaccttgattacaggtgactccttgacctccagcaacgatgatgaggaccccaagtcccatagggacctctcgaataggcacagttacccccagcaagcaccctactggacacacccccagcgcatggagaagaaactgcatgcagtacctgcggggaacaccgtcaagttccgctgtccagctgcaggcaaccccacgcccaccatccgctggcttaaggatggacaggcctttcatggggagaaccgcattggaggcattcggctgcgccatcagcactggagtctcgtgatggagagcgtggtgccctcggaccgcggcacatacacctgcctggtagagaacgctgtgggcagcatccgttataactacctgctagatgtgctggagcggtccccgcaccggcccatcctgcaggccgggctcccggccaacaccacagccgtggtgggcagcgacgtggagctgctgtgcaaggtgtacagcgatgcccagccccacatccagtggctgaagcacatcgtcatcaacggcagcagcttcggagccgacggtttcccctatgtgcaagtcctaaagactgcagacatcaatagctcagaggtggaggtcctgtacctgcggaacgtgtcagccgaggacgcaggcgagtacacctgcctcgcaggcaattccatcggcctctcctaccagtctgcctggctcacggtgctgccagaggaggaccccacatggaccgcagcagcgcccgaggccaggtatacggacatcatcctgtacgcgtcgggctccctggccttggctgtgctcctgctgctggccgggctgtatcgagggcaggcgctccacggccggcacccccgcccgcccgccactgtgcagaagctctcccgcttccctctggcccgacagttctccctggagtcaggctcttccggcaagtcaagctcatccctggtacgaggcgtgcgtctctcctccagcggccccgccttgctcgccggcctcgtgagtctagatctacctctcgacccactatgggagttcccccgggacaggctggtgcttgggaagcccctaggcgagggctgctttggccaggtagtacgtgcagaggcctttggcatggaccctgcccggcctgaccaagccagcactgtggccgtcaagatgctcaaagacaacgcctctgacaaggacctggccgacctggtctcggagatggaggtgatgaagctgatcggccgacacaagaacatcatcaacctgcttggtgtctgcacccaggaagggcccctgtacgtgatcgtggagtgcgccgccaagggaaacctgcgggagttcctgcgggcccggcgccccccaggccccgacctcagccccgacggtcctcggagcagtgaggggccgctctccttcccagtcctggtctcctgcgcctaccaggtggcccgaggcatgcagtatctggagtcccggaagtgtatccaccgggacctggctgcccgcaatgtgctggtgactgaggacaatgtgatgaagattgctgactttgggctggcccgcggcgtccaccacattgactactataagaaaaccagcaacggccgcctgcctgtgaagtggatggcgcccgaggccttgtttgaccgggtgtacacacaccagagtgacgtgtggtcttttgggatcctgctatgggagatcttcaccctcgggggctccccgtatcctggcatcccggtggaggagctgttctcgctgctgcgggagggacatcggatggaccgacccccacactgccccccagagctgtacgggctgatgcgtgagtgctggcacgcagcgccctcccagaggcctaccttcaagcagctggtggaggcgctggacaaggtcctgctggccgtctctgaggagtacctcgacctccgcctgaccttcggaccctattccccctctggtggggacgccagcagcacctgctcctccagcgattctgtcttcagccacgaccccctgccattgggatccagctccttccccttcgggtctggggtgcagacatgagcaaggctcaaggctgtgcaggcacataggctggtggccttgggccttggggctcagccacagcctgacacagtgctcgaccttgatagcatggggcccctggcccagagttgctgtgccgtgtccaagggccgtgcccttgcccttggagctgccgtgcctgtgtcctgatggcccaaatgtcagggttctgctcggcttcttggaccttggcgcttagtccccatcccgggtttggctgagcctggctggagagctgctatgctaaacctcctgcctcccaataccagcaggaggttctgggcctctgaaccccctttccccacacctccccctgctgctgctgccccagcgtcttgacgggagcattggcccctgagcccagagaagctggaagcctgccgaaaacaggagcaaatggcgttttataaattatttttttgaaataaagctctgtgtgcctgggtc

SEQ ID NO: 3490 - protein, 790 aa, Homo sapiens
MRLLLALLGVLLSVPGPPVLSLEASEEVELEPCLAPSLEQQEQELTVGQPVRLCCGRAERGGHWYKEGSRLAPAGRVRGWRGRLEIASFLPEDAGRYLCLRSMIVLQNLTLITGDSLTSSNDDEDPKSHRDLSNRHSYPQQAPYWTHPQRMEKKLHAVPAGNTVKFRCPAAGNPTPTIRWLKDGQAFHGENRIGGIRLRHQHWSLVMESVVPSDRGTYTCLVENAVGSIRYNYLLDVLERSPHRPILQAGLPANTTAVVGSDVELLCKVYSDAQPHIQWLKHIVINGSSFGADGFPYVQVLKTADINSSEVEVLYLRNVSAEDAGEYTCLAGNSIGLSYQSAWLTVLPEEDPTWTAAAPEARYTDIILYASGSLAVLLLLAGRGQALHGRHPRPPATVQKLSRFPLARQFSLESGSSGKSSSSLVRGVRLSSSGPALLAGLVSLDLPLDPLWEFPRDRLVLGKPLGEGCFGQVVRAEAFGMDPARPDQASTVAVKMLKDNASDKDLADLVSEMEVMKLIGRHKNIINLLGVCTQEGPLYVIVECAAKGNLREFLRARRPPGPDLSPDGPRSSEGPLSFPVLVSCAYQVRMQYLESRKCIHRDLAARNVLVTEDNVMKIADFGLRVHHIDYYKKTSNGRLPVKWMAPEALFDRVYTHQSDVWSFGILLWEIFTLGGSPYPGIPVEELFSLLREGHRMDRPPHCPPELYGLMRECWHAAPSQRPTFKQLVEALDKVLLAVSEEYLDLRLTFGPYSPSGGDASSTCSSSDSVFSHDPLPLGSSSFPFGSGVQT

SEQ ID NO: 3491 - DNA, 2963 bp, Homo sapiens
tcccggccgaggagcgctcgggctgtctgcggaccctgccgcgtgcaggggtcgcggccggctggagctgggagtgaggcggcggaggagccaggtgaggaggagccaggtgagcaggaccctgtgctgggcgcggagtcacgcaggctcgaggaaggcagttggtgggaagtccagcttgggtccctgagagctgtgagaaggagatgcggctgctgctggccctgttgggggtcctgctgagtgtgcctgggcctccagtcttgtccctggaggcctctgaggaagtggagcttgagccctgcctggctcccagcctggagcagcaagagcaggagctgacagtagcccttgggcagcctgtgcggctgtgctgtgggcgggctgagcgtggtggccactggtacaaggagggcagtcgcctggcacctgctggccgtgtacggggctggaggggccgcctagagattgccagcttcctacctgaggatgctggccgctacctctgcctggcacgaggctccatgatcgtcctgcagaatctcaccttgattacaggtgactccttgacctccagcaacgatgatgaggaccccaagtcccatagggacctctcgaataggcacagttacccccagcaagcaccctactggacacacccccagcgcatggagaagaaactgcatgcagtacctgcggggaacaccgtcaagttccgctgtccagctgcaggcaaccccacgcccaccatccgctggcttaaggatggacaggcctttcatggggagaaccgcattggaggcattcggctgcgccatcagcactggagtctcgtgatggagagcgtggtgccctcggaccgcggcacatacacctgcctggtagagaacgctgtgggcagcatccgttataactacctgctagatgtgctggagcggtccccgcaccggcccatcctgcaggccgggctcccggccaacaccacagccgtggtgggcagcgacgtggagctgctgtgcaaggtgtacagcgatgcccagccccacatccagtggctgaagcacatcgtcatcaacggcagcagcttcggagccgacggtttcccctatgtgcaagtcctaaagactgcagacatcaatagctcagaggtggaggtcctgtacctgcggaacgtgtcagccgaggacgcaggcgagtacacctgcctcgcaggcaattccatcggcctctcctaccagtctgcctggctcacggtgctgccaggtactgggcgcatcccccacctcacatgtgacagcctgactccagcaggcagaaccaagtctcccactttgcagttctccctggagtcaggctcttccggcaagtcaagctcatccctggtacgaggcgtgcgtctctcctccagcggccccgccttgctcgccggcctcgtgagtctagatctacctctcgacccactatgggagttcccccgggacaggctggtgcttgggaagcccctaggcgagggctgctttggccaggtagtacgtgcagaggcctttggcatggaccctgcccggcctgaccaagccagcactgtggccgtcaagatgctcaaagacaacgcctctgacaaggacctggccgacctggtctcggagatggaggtgatgaagctgatcggccgacacaagaacatcatcaacctgcttggtgtctgcacccaggaagggcccctgtacgtgatcgtggagtgcgccgccaagggaaacctgcgggagttcctgcgggcccggcgccccccaggccccgacctcagccccgacggtcctcggagcagtgaggggccgctctccttcccagtcctggtctcctgcgcctaccaggtggcccgaggcatgcagtatctggagtcccggaagtgtatccaccgggacctggctgcccgcaatgtgctggtgactgaggacaatgtgatgaagattgctgactttgggctggcccgcggcgtccaccacattgactactataagaaaaccagcaacggccgcctgcctgtgaagtggatggcgcccgaggccttgtttgaccgggtgtacacacaccagagtgacgtgtggtcttttgggatcctgctatgggagatcttcaccctcgggggctccccgtatcctggcatcccggtggaggagctgttctcgctgctgcgggagggacatcggatggaccgacccccacactgccccccagagctgtacgggctgatgcgtgagtgctggcacgcagcgccctcccagaggcctaccttcaagcagctggtggaggcgctggacaaggtcctgctggccgtctctgaggagtacctcgacctccgcctgaccttcggaccctattccccctctggtggggacgccagcagcacctgctcctccagcgattctgtcttcagccacgaccccctgccattgggatccagctccttccccttcgggtctggggtgcagacatgagcaaggctcaaggctgtgcaggcacataggctggtggccttgggccttggggctcagccacagcctgacacagtgctcgaccttgatagcatggggcccctggcccagagttgctgtgccgtgtccaagggccgtgcccttgcccttggagctgccgtgcctgtgtcctgatggcccaaatgtcagggttctgctcggcttcttggaccttggcgcttagtccccatcccgggtttggctgagcctggctggagagctgctatgctaaacctcctgcctcccaataccagcaggaggttctgggcctctgaaccccctttccccacacctccccctgctgctgctgccccagcgtcttgacgggagcattggcccctgagcccagagaagctggaagcctgccgaaaacaggagcaaatggcgttttataaattatttttttgaaataaagctctgtgtgcctgggtc

SEQ ID NO: 3492 - protein, 754 aa, Homo sapiens; identical to SEQ ID NO: 3488

SEQ ID NO: 3493 - DNA, 3083 bp, Homo sapiens
tcccggccgaggagcgctcgggctgtctgcggaccctgccgcgtgcaggggtcgcggccggctggagctgggagtgaggcggcggaggagccaggtgaggaggagccaggtgagcaggaccctgtgctgggcgcggagtcacgcaggctcgaggaaggcagttggtgggaagtccagcttgggtccctgagagctgtgagaaggagatgcggctgctgctggccctgttgggggtcctgctgagtgtgcctgggcctccagtcttgtccctggaggcctctgaggaagtggagcttgagccctgcctggctcccagcctggagcagcaagagcaggagctgacagtagcccttgggcagcctgtgcggctgtgctgtgggcgggctgagcgtggtggccactggtacaaggagggcagtcgcctggcacctgctggccgtgtacggggctggaggggccgcctagagattgccagcttcctacctgaggatgctggccgctacctctgcctggcacgaggctccatgatcgtcctgcagaatctcaccttgattacaggtgactccttgacctccagcaacgatgatgaggaccccaagtcccatagggacctctcgaataggcacagttacccccagcaagcaccctactggacacacccccagcgcatggagaagaaactgcatgcagtacctgcggggaacaccgtcaagttccgctgtccagctgcaggcaaccccacgcccaccatccgctggcttaaggatggacaggcctttcatggggagaaccgcattggaggcattcggctgcgccatcagcactggagtctcgtgatggagagcgtggtgccctcggaccgcggcacatacacctgcctggtagagaacgctgtgggcagcatccgttataactacctgctagatgtgctggagcggtccccgcaccggcccatcctgcaggccgggctcccggccaacaccacagccgtggtgggcagcgacgtggagctgctgtgcaaggtgtacagcgatgcccagccccacatccagtggctgaagcacatcgtcatcaacggcagcagcttcggagccgacggtttcccctatgtgcaagtcctaaagactgcagacatcaatagctcagaggtggaggtcctgtacctgcggaacgtgtcagccgaggacgcaggcgagtacacctgcctcgcaggcaattccatcggcctctcctaccagtctgcctggctcacggtgctgccagaggaggaccccacatggaccgcagcagcgcccgaggccaggtatacggacatcatcctgtacgcgtcgggctccctggccttggctgtgctcctgctgctggccgggctgtatcgagggcaggcgctccacggccggcacccccgcccgcccgccactgtgcagaagctctcccgcttccctctggcccgacagttctccctggagtcaggctcttccggcaagtcaagctcatccctggtacgaggcgtgcgtctctcctccagcggccccgccttgctcgccggcctcgtgagtctagatctacctctcgacccactatgggagttcccccgggacaggctggtgcttgggaagcccctaggcgagggctgctttggccaggtagtacgtgcagaggcctttggcatggaccctgcccggcctgaccaagccagcactgtggccgtcaagatgctcaaagacaacgcctctgacaaggacctggccgacctggtctcggagatggaggtgatgaagctgatcggccgacacaagaacatcatcaacctgcttggtgtctgcacccaggaagggcccctgtacgtgatcgtggagtgcgccgccaagggaaacctgcgggagttcctgcgggcccggcgccccccaggccccgacctcagccccgacggtcctcggagcagtgaggggccgctctccttcccagtcctggtctcctgcgcctaccaggtggcccgaggcatgcagtatctggagtcccggaagtgtatccaccgggacctggctgcccgcaatgtgctggtgactgaggacaatgtgatgaagattgctgactttgggctggcccgcggcgtccaccacattgactactataagaaaaccagcaacggccgcctgcctgtgaagtggatggcgcccgaggccttgtttgaccgggtgtacacacaccagagtgacgtgtggtcttttgggatcctgctatgggagatcttcaccctcgggggctccccgtatcctggcatcccggtggaggagctgttctcgctgctgcgggagggacatcggatggaccgacccccacactgccccccagagctgtacgggctgatgcgtgagtgctggcacgcagcgccctcccagaggcctaccttcaagcagctggtggaggcgctggacaaggtcctgctggccgtctctgaggagtacctcgacctccgcctgaccttcggaccctattccccctctggtggggacgccagcagcacctgctcctccagcgattctgtcttcagccacgaccccctgccattgggatccagctccttccccttcgggtctggggtgcagacatgagcaaggctcaaggctgtgcaggcacataggctggtggccttgggccttggggctcagccacagcctgacacagtgctcgaccttgatagcatggggcccctggcccagagttgctgtgccgtgtccaagggccgtgcccttgcccttggagctgccgtgcctgtgtcctgatggcccaaatgtcagggttctgctcggcttcttggaccttggcgcttagtccccatcccgggtttggctgagcctggctggagagctgctatgctaaacctcctgcctcccaataccagcaggaggttctgggcctctgaaccccctttccccacacctccccctgctgctgctgccccagcgtcttgacgggagcattggcccctgagcccagagaagctggaagcctgccgaaaacaggagcaaatggcgttttataaattatttttttgaaataaagctctgtgtgcctgggtc

SEQ ID NO: 3494 - protein, 790 aa, Homo sapiens; identical to SEQ ID NO: 3490

SEQ ID NO: 3495 - DNA, 84187 bp, Mus musculus
  misc_feature (1)...(84187): n = A, C, G, or T/U
cctagtgtgttctgcaaattgatgctagcatcttagcataggtactatagattcagttatggataattatagggagggtgttagaacacctaggcccttcaggtcataactagagaacacttcaggcaagcaagtcccatctctgaccatgctaccaccaagcacagcaagccccagctcctcgctgcctggggttggagtcaacttatagtcacacattaatcagccatcctttcctttctagtatctctgtgacttttagcatacctatgcaggtcatagattaacttagagccccatcctctttagagacctgtaggagtggggatgtaccaggtgaggctttattggaagccattcttactatgttgcaattagatgcatgaagagtcgaaagggcaacattgtcttgggtatgttctcaggtggtggtagggactttgtgggagccagatggagcctcctgccgccaaagttgttgcttttccagggctctgtccttatctccttggcttggctatctcgtacccagccagaaccccttttatttcctatccccattgttctcaaggtcaccatttcaatcctgacattcattttaactcacatttgtttttaccccagtatcacacaaattctataagccatcaacttccttttgagacctgtcttattattttttcatgctattctcataaaatacttgagatgaagtaatttatttataaacaggtttatatctgacagttctgaagactggggagtccaaggtcagggcgcagttattttggatgcttggtaaggacctgccagggtgactccttcttgctaagttctcacaaagtaaaagggacggaagggcaaagtggggctgccagctcaacccctgcacccctactaatcacactggtgacttaagcatctcctaaaggccacttaggactataacactgagttgtctctccagccttgataattaccttcaacactgaagccttggaggtaagcatagcagtatccctgtactaaaactagttttaagcagtcaggaactcttcatgacttagctaggggttaagagtcttggatttagggctttgttttaaagctcaaaggttaagatactagaactgaatatgtctgtttatgttgccttgcctgtttaacacccaccaaatcgtatcaagactgcagcaaagagatattatatggatgcttagcctttttgccatggatagaccatcctgcactctaaccgacagtcacagaactctcccttctcaacacacttcatcacatagcagagtatcttatagtcttactcgtttttagaaaccgttaagttgcttttggaaccatcggtgtttcgggagagtttgaagtctgagctgtctgactggggcgactggaaaccaccacgttctctgctcatttgtttaaagatgtttaactagttgataaaagaggcaataagaactttggactcctcgtttatgagtttttatttaaatcaactttgggcttccttggaatgactctccaattttactatgccacgcgtttcaacattgctcaaaataaatatatgcatgtgtagctaacctagaacctctaagttcctgaatggccgtcatgtctcccctaatatcagtcactttttggtaaggctgactgactttaaagaatcttcctaaatatttcctctttcccagtttagtagtattcgacccctagttaaaatatcttcaggacctaaaaggaccggctcgttctgaacctatgaatattcttagtttatttaagaaccaaccctgcagtgttggtttacaaacagggaaatgtggtcacccacctcttccactgttcaagaagattggttgttactctcaaatggacccttcctccaggtgaactgtccctgagaggactgaaggtgacttgggaaatatccttcaaacaaaacaaaataaaaacaaaaaacaaaacaaaacttgcgtcaggaaacagagtctgctaaactagtttgcctcatataaaacagttattatgcttaatttctaataatggaggcataaacatgtaattccatctctcccagttccatctgttttagaggttaaggcctgtttgttatgttggctgttaatggtcttttattcacaatctagatgatgaagacctgatttttcagatcttcttgggtctttcagagcactcaagctcttccttaaggcaagcatcagtgtggaggaggtagcattgggcatcacactggtcagagtcagttccagctggggctctatcagctacgtgatctagggccagtttcttctctgagattccgtttgtttctccttattccttccttgtctccttccccctgccttccttctaatgtgacagtaatgtttatttaccaaaattcaacggtttaaacagcatcgagcaaaacatgagacagtaggcgacagcaggaagacagcgggagcaccgcctcccacgccctttctagggcagatgcgtccttttctctggggctcctctaaaatggcatgcaatggttcactaggagcacagcctttctccttagcactgttttgtttgtggttgttcaatgattctgtgaagatcaacctttttattttttttacatcagaatgtactctttatactaaatactctgtgaaaactcagtgcatagaataatagtggttggcatggttttatacaaacaaaaatatccatttcttttttttttattttttattttttattagatatttcctttatttacatttcaaatgttatcccctttcctagtttcccctctggaagtcccctacccactcccaccttcccctgctcactaacccatccactcccatttcctgaccctggcattcccctatacgggacatagaaccttcacaggaccaagggactctcctcccattgatgactgactaggccatcttctgttacatatgcagctagagccttgagtcccaccatgtgttttctttgattggtggtttagtccctgggagctctgggggtactgattggttcatattgttcctcctatgaggctacaaactccttcagctccttggatcctttctctagttccttcattggggaccctgtgctccatccaatggatagctgtgagcatccacttctgtatttgtcaggcactggtagagcctcttaggagacagctttatcaggctcctgtcagcaagcatttgttggcatctacaatagtgtctgggtttggtggttatttatggaatggatcgggggcagtctctggatggtcatgccttcagtctctgctccaaactttgtctctgtaactccttccatgggtattttgttcccctttctaagaaggattgaagtatccacacttttgtcttccttcttcttgagtttcatgtgttttgcaaattgtatcttgggtattctgagcttctaggctaaagtacccatttcaaaggaagccttttaaggttttagattttccaaatgcattttgccaaagctcctctttccccaatcccctcacctcaggccattcttttttatgagaggacactgttttccttgcaaatcagtttttcaatttctaaaatgcccttttcagctgaaagaatttaaaaatcatataaggtatagcagaatcctgaaggtgactagcctacaagatctttacagcatccataagcttttaatgacatcatatgtcccagattaatttcccgcgcttcacatgtattgcatatggaatgtttttacccattgcctcaaagagccatttttagaattagtcaaatttgtacttttacattaatgaaacaatggaattgtgagggctcacttaataagtaggttagtgtcagttttgacatagagaaactagtcctgggtcccagcatgatttgatttcatgcttctctgtggctctaagtgatacaagacaaattcgtttccatcttcagcttctgttccttatctttccataatcccggtctcatttcagtaaggccacctgaaatccaagaatcgtcctaaatttctccactttcttagtagccttccattcttagttaaagtaagctccctgagatgaaaggactcatggtccctgaacataggcatgtcttcagtgtagaaactaaactgagtgcgagctgagttccccactgacctgcagcagcctggggcattctctttagtcaccaccacagagaagccctgggatatccttgcctcggctgcagactagaatctcaggaagagtcagtctgaagcaggtttaaatgtactggtaatcgacttaaaatctctatttacaaatggatgatgttaacagaatgtgtgctcagcggggaaagacagtattgccagtatgtgaggtgtgagcttcccgtgtgtgtgtgtgtgtgtgtgtatgtgtgtgtgtgtgtgtgtatgtgcaggcgtgtcatttatacacaggagattacagcatggcttaaagaaagtttctattcttgtttgtttgttagattcctaggaaaatgcaggtttcaatcttgaaaaggaataaagccagagtgatttcagccttaagcatggtcactgataatgaaatatctctataaaaataacattgcctctatgtgggctatccctaagacaattttgttaattttgctggaacctttgacttgttgcaggtaagagagtttaagtgaacctgagaccagagtcccctttcttttcacatcttagcttatatgtcttgccttagaatcttaggctttagttttaacattttagttaaaacttaaggcaaacaagtgaactgtctgttttaataggtagatgaaggtgttgagataagtttgatcacgctgggtacagcttagcaaatttgagaccaacagggctacctcgtgaactcttgccaataaataaataaataaataaatagaaacttcaaatttctgttttttctttttaactgtttcagtgaaatcaatgttatcagannnnnnnnnnnnnnnnnnnntgagtctccatgtgatatcctgcatatcagatatttatgtcacaattcataccagtagcagaattacactgaagaagtagcagtgagatcattttatggttgggggccaccacagcatgaggaaggttgtagcatgaggaagggtgagaactgcaaaagaagactcttttgctccacatttgaaagtgtgcaatctgcttgctctatgaatctgtctcaaagagtcaattgaaactttctagcctgggataaatcctgtttgttttgttttttgctcatccttggttattgaagcactgttcacaatatgtatgcaacttgggactaaatccttcactgatgtcttgctaagctgattcagaaagtagaaccagcgattggtatacagatgaactaaaactgaagtaatgaaatgaaaattagcattgggtttgcagccgctagctaggctagctctcaagagatttaggggataatacttctctcagctttataaattatatttttgaagttattggtggtagaaaatgtaacttaattttctatttttcccagtacttctttacattgtagggacaatgactgaatgaatgactgaatgacttgctgaatgaatgactgtgtttaacattaccgttacttaatattttggctgtcttagtaatttccgccatcctaatccatgcagtgtgtggaagtgaaatacttttcttggggtgatattagttttggttataccccttcccctttgtggttctggaacctctcacgtagtgtgcaagtactttgccattgagctctgttgtctttcccttccagtctctttgaaacgttactctcccaagatactacctaatggctggctgtagcatttgcttgcctttagtagtcccagtaaggacctggctggcttgcgtactgggcagaaaagcagaagcgaagagggaagtgaaagggaaagaaacagaacagaaatgcacaactttggggactagagcatgttactggcatctgtgtcacaaagtcagtggcgcgtcgatggcagttgtctacatgtttattattaaggacgtcttttatttaaaggggagcaattcaaaaggtggcattaaaaagtatttttatctgtttattgtgatgaataataatacaactgaccatttctcagcacagagctctgatgtacttggtattatttttaacccttacgtgaaccggagaggtgggtgcgattgctttgattttgcaggtgggaaggtggtggcgttgaaggttgaatgggtggtactaaatcatgtaagcaaaagagctgatttctgatacaaaacctatttnnnnnnnnnnnnnnnnnnnncgtgagtctccatgtgatatcctgcatatcagatatttatgtcacgattcataacagtagcagaattacactgaagaagtagcagtgaggtcattttatggttgggggccccacagcatgaggaaggttgcagcatgaggaagggtgagaactgcaaaagaagactcttttgctccacatttgaaagtgtgcaatctgcttgctctatgaatctgtctcaaagagtcaattgaaactttctagcctgggataaatcctgtttgttttgttttttgctcatccttggttattgaagcactgttcacaatatgtatgcaacttgggactaaatccttcactgatgtcttgctaagctgattcagaaagtagaaccagcgattggtatacagatgaactaaaactgaagtaatgaaatgaaaattagcattgggtttgcagccgctagctaggctagccctcaagagatttaggggataatacttctcccagctttataaattatatttttgaagttattggtggtagaaaatgtaacttaattttctatttttcccagtacttctttacattgtagggactcagtaagtccttgctgaatgaatgactgtgtttaacattaccgttacttaatattttggctgtcttagtaatttccgccatcctaatccacgaagtgtgtggaagtgaaatacttttcttggggtgatattagttttggttataccccttcccctttgtggttctgggacctctcacgtagtgtgcaagtactctgccattgagctctgttgtctctcccttccagtctctttgaaacgttactcttccaagatactgcctaatggctgtctgtagcatttgcttgcctttagtagtcccagtaagggcctggctggcttgagcactgggcagaaaagcagaagcgaagagggaagtgaaagggaaagaaacagaacagaaatgcacagctttggggactagagcatgttactggcatctgtgtcacaaagtcagtggcgcgtcgatggcagttgtctacatgtttattattaaggacgtcttttatttaaaggggagcaattcaaaaggtggcattaaaaagtatttttatctgtttattgtgatgaataataatacaactgaccatttctcaccacagagctctgatgcacttggtattatttttaacccttacgtgaaccagagaggtgggtgcgattgctttgattttgcaggtgggaaggtggtggcgtgaaggttgaatgggtggtactgaatcatgtaagcaaagagccgatttctgatacaaaacctatttcctttcagtccctccacaaatatcattgtaaggaaatcaggatacgtttggctagcctgaagctcaggagtagagcactcacccagcaaccatgtgtcctgtactgatcgctagagagcaagagggaagtggaaaggaaggcgagggagggggcagggaaaattaacgtaagtcctttaaacaaatcaggactgatgctacacacttgttcagtgtcagagtaatgtgaagtagcgacagaagtgcgacttgacagagagcaggacatgtggcacagcaccggtgaagagggtcagctcagatttggactgcctggtcctgacagtccgtgattggtcctttataccttctgtctttttacatataacaacagttccaacagcaacttacacggtaaagaataagaacaacaattgcttttacagctcacaatgtatttcattttatatagttctttgcattgtagcgtgaaatatacatacacaaaagtgaattaagcacacactcacacatacatagggttatagagcaaatatccctgtaacaacaattagattgaagaagatgaacactgccagtaccacataagatctcctgtctttcctgttacaaccctctgatcctccttccagcgggttctctcagcatcagaagtgacgctgcttcgtcaggatcatttccagaaaggaagctgctcatgcattatagatgtttagtatctcactgacctctgtccttgatatgtcagttaaaagacatcctctcccaaattacaccgactgattgcaggatgtcaaattcctcctatattgctctggtctacatctctctgtggtagaataaactgtagggctgggataacagcagagagttggactcatctgttagggttattgatccctttacattaaatagtgtttggagaacctgattgaagaaagagatgcagttgagtcctgtacaatcttttctgaactggagaagttgtcttaggttgcatatgctgctattattaaaaatattgtcttttattttagatcattttaattgtaccagcgatgatttttcaattaaaaaaatagagtaagtaagcaaaacaaagcatatttcaacaggtgagttattctagagtctatcagcatagtaccatgtgggttatagtataatgcctacgagagagtcccagaattctaatatagttaaaatcctgagcccatagatgaagaaaacattatacactctccccttaacctccccaggcttgttctcaagttttctgttaaaccctgagtacccacggatgagaagataatgcttcttaaacatttaaaagtaaaactttgtatgtgccagtaataataataaaaatagtgtattctcaaaacaagaagacagttgtgatggtaaggaatggggatgcttatggattcagtgaagggaaagccaggaagagtccagatggattagatgccgagcatgagaagtctccgatgggacaagcagaaggaccgagaggccagcagttgaagtaggagaagagtatgcatgtggtttgggttgggtcttttatttttgagcaagaaagtcgagtttggaacatgctaagtgtgagttatacaattctatctaggaaaagatgctgagtagcttagctgaatgtgcaggtgcgctcaggagagatgcttgactagaaacattacgcagaagttggcatccttacatctcctgcattgtctgtagttgaagcgctttatcttcacacctcctcattcggtagccacagtgccgaggaggcttagcgtcctcgtgagagctgctctgaggggaaactcttacagtctttcctttaggtggacctcggtctctgtctgttttcctaagtctggaggctttgaagacctcatctcatactccgaaagagcagccgttccctgcacccatcccttgcggccatttcagaggttcttttcgttgccaccagcttacctaatctcattccctcttttttaagctttccaaaagatttttaaaatattctgttccagggttgggtccaaataactgaatctgtatactcccggaaatgaattgtctcacttatttttttttttaggctgaaaggcaaaaaaagaaaacaaatccagttagtaatgatatttctgataaatgtcaatcatatacctcctttaagccctggcggctttgcaccatggtcctaggcttgcctaagagtcggagaccaacctggggaatagggagccgcctttaaaaacgataccagcagcaaattcccatacctctctattttgtctgcatgcaaatatattaaaaatagtaaaatgtttttaagattaaacaaaattactttttttttctggttgctataggactggctgccccagtgcctggaatctgagggaaaatggcaaatgtggatggtgattccaggcatcttctctctgaggtggaacatgaagtaagccctgggcctatgaacatccagtttgattcatcagatctgagatctaaaaggtgaggtcttaatgtgctcacttcatacctagggcttctagcaattaagatataatacagtacagcccaaaagatcaatagactcgataatgaaatcatcattttcttacaggactcataccctgatgtgtgtgcatatgagtcctgtttcctcacttgcacatttttgtgtcttggaataaacgagtctgttaagcaaagggctgggttttgtcaaggagggcgcatgtatgtaagggactcggatgcctgttggttgcccgcttcgtgcagagtaatctgatactacagatagaaaaggaataggcctttgccttcactgagctacaatgacagcgggtaacttaaaatcacttgagattaaataatctttcagtttatgactggaaacctcaagagaatctcctttaaaaaaaaaaaaagtcccagtaagtgagttcgatcaagtagttattgggtagaaagatgctgacgtgagtaagatgcttagtgtgcaactgaaggaccaaaggttgcatcctagcaaccacataagctagatgtgagcccacgtacaactttaaacacagtgatggagtgagtcgagataggaggatcaccacgacttgctggctgccagtctataaaaaacaaacaaacaaacaaacaaacaacccacatgagttccagaaagagaccttgcctcttagaaacaagatggaagataattgccctcctctggcctcaatgcatatacaaacttgtgggcacacatacacaaagtgattacttacaaaataggcaaaaataagaccaaatgtgtgatggcccattcctagcatttagcactcaagaggcagaggcaggaagattgtgagattggggccagcctgggctacttactcatacctagtctgttaaaaaaaaaaaaaaaagaaaaagaaaaaggaaaagaaaagaaaagaaaagaaagaagtaacatgcaaaaagccccgaggcaccagcaagatggctcagcaggaaaaggccactgagcctgactacttgagttaaatccccaggattcacaggatggcgggagagaacttacccaaagaaagtgttcagacctgcagataaatacaatagcacttgtgtgttcacactctagataaataaatgaagaaagaaagagaggaaaaaaagatgagaaaatgagatagaaaaatatataaaatacgcttgcagtagttttaacaggaatgtgcaaaatctgtgagaaaaactaaaatgttcctgaatgatgtaacatgggatttggaatatttcatcaaatctgagatgctgttggttgtcaattgcgtttaaaatatacaaagcctggcatagtggcacgtgcttttaatcccaacacttgtgaggtacaaactggcagatttctatgggtttgaggccagtgtggtctagagtgagttccaggagagctggggctacatactgagacttgacttgcatggtgggcaggtaggtaggtaggtaggtcggtcagtcagccagtgggtcagaaagacgcactgatagacagacggacaaagagggtttggaacgaagttcagtggttaagagaactgactgttctgttagaggacctggatttgattcctagcacacacatacatgatagctcacaactgtccgtaattccagtcccaggagatctgacgccttcttctgttctccatcaacagtagccatgcacatggtgcacagacattcttgcagacaaagcacccatacacataatcagatcatttcaaaaaccccaacccacaacacgcacacactcactcacgcatgctgtgcccgtgtgtatcatacatgtacagtactggacttggaatttttgctgtgttttcactggaagaactcttgaccgtatgtgttacttctcatttgtctcttatggaactatacaagttgatcatagaaacaaagtgcattggttaagacattattaacacctcacacttaaaaaccctggctcttctggatcagcttttgatttagtcatcagaccagttgtgtgtccctcctacgtggacaattgtcctttggccggaaagagagtgggtggctttgatgacacagccttccttggtttcttcagcagcactgaggccgcgcgcaggttcccgtccttgcactgtcccggtctcaccagatggcgtcatgagaggccttctcactttccggttcccatgccttcttcagtggtttgacagagatggcctggcagtcggatgtcagcacaccaccagaagtagcgagcacactgccacctggccaacagtaattcagacatccggtgttagagattgtgaggtgtcctcgtttagaaatgtttaagtgcatatattagaaaagtatcttatcagtaagctatgacagaagtcattgtctactgccggcaggaagaatacaattgtgatgtaggggggattaaatccaggggagaggctctgtcagtgaagtatttgtcacacaaacttgagcccccatataaaatccaggagctatggtgtgtacctgtaaccaccacactagggaggcagggacagatggcttctggagagcattggctagcgaggccagccaaattgatgagctccaggctggtaagagactgtctcaataaatagcaaataaataaacaaaccatctcaaatatgccactaaatgagagagagagagagagagagaggtagttcaattagatacctgatgatgacgtctggcctttttatacttgtgctcacatattcttatgtacaccagaaaaaagaatttaacccacaaattttgtgtgatcctccactcagatcccagcggcaactctgaggtttctgggtagcagaatctcactgccttacagcgtcaaccggtgcctgcgtggggtcatatacgttgctaagattgagtgactaaaatatgttttcttccagggctgaaaaactacattatagtgtgttcatacaatgaaatatttttcatctaataaaaaggaggtgggcttatgacataccaaaatgaaacaactcttcgagttattttgttaaaagaaaaaagtgagttgcagagcagtatgtatagtctgccaccattcatgtaaagttgctcgctgtattgtagacaatacagtatgtgcagatggagtcgggaaggcttgggtggctgagaggagctgcacagctgaggtaagggagcctggtgcatagagttagtaggtcctcagtacccagtcagtgactaccctcgttgctatcagcagaatgttagtctagataagagctgcagctatttccagcccaggagataagaaagattgcagtgagctgatcctggcggtattgttatcatttcttccgatagttgatgtttcagtttttcttgtagctaaaactggtagtgtgaaatttatccctgaagaaagtgtcgttaacagtggctatcagaagaaacagagaaatcgataattgtgattctcactggtatatttcagtattagtgaatgtagtccacttacaaatgctgactgaatgcttagagtttttcttgaagcttctaagttctgtgataaataattggccactgtgacaatgagtcataggtcattaaagtgcattccattatgacaagtcggcagttcagttccttgaaattttaatctaacagggtatattaaatggaaatacattttctataatgaaacttcaaaaaggaaggagtccgctattttcaatcctggcgtaactggtaagaaaggagagcaaccacttgtaagaacttagcagtccttgttgcttctgcttgtgggataatctctgctggagaaagcagagactattagatgagaaaaagtatgtgagtactttaagacattgttcctgctgagggatagagtctccaactttccatgtaaataaaatgtagacaactagtatcaagcttcagttctttgagtcaccatgctctggtgcccccttgtgtatatacatctctctctctctctgtatgtatgtatgtatgtgtatatacacacacacacacacacacacatatatatatatatatatatatatatatatatatacatatatacatatatatatacacatatacatatatacatgcatatacatacatatacatacatacatacacacacacacacacacacacacatatatattataattggatgtttcttagcagtctgctccccttccagctctgagttcatttagctttatctcatgtttgtaaagtgaggactttagagtgcttatacttgtctattgtatattgctatatacaccagccagtcagcgttcacgattgtggtgtcaagggtcatcctgcacttgggaaactttggctataggatgatgggagacaacatttgatgtctgagtatttcttggcctacggttagcttgtgttatttttctacctcccactaggtggcattcgcgtcttacaattaagacttttagctggcacagactaaggggttgcaggccaagcattttgacaagtggagtctaaagcaggtggaggaagggctgtgccgttgtaagctgcatgccatcggcatgtggatcatttaggtgcattataaaaaagtaaggcccctgtttcttcagcacgcctccctctgatgctattttgtcacctgtttggagagagaatgaacaataaaaaagtaaatggaagagcagaaaggtctagaagtctgctgtgttctattcgatacattctactgggaatgagcaggcttttctcaggcttttggaggctactaatggagctggtactcagggtagcctcatattttcctactgctctgtgactatgccctgggaaagttgaccaccccagccagccaacaaagttatgaaatggttgatttttaatttctttccagttctgggtattgaacccatggccttgtgtattgctacgcaaaccctctactgtggcttggctcagtttttagcttttcccttctctgtgtgtctttgtttcccctttccttctgctgctccttataggcccagggtgacaccgtaaggcaggagctcgctcaggccccaaccccctaagcatgctctgtacacagacttttctcctacagcttgcgtaccagcacttggctgctctgctcttgtaggactctgttgcccacttggtatcaaaatggagaataatctgatctatcagagatatcatctattaaactcacagggctgttttcatttcaacaccaaaacatctcaaaataccaaatcctaacattcaagcttttgctattgaggatgttgtagtgctctaacaagccaccattaattggatatctcaaatgcacagcttcctcacacccttggagtgtgtaagatacattatggcaccttgctgtttagggtacctacagtctgtgcatttgtgaatcagcctctctatttctcctcccacaaatgctgtcactgtagatcagcctgagttgacagtgggtatttgcggccctaggagagaggaagactcaagccgtttcccaaggcaaagtaaaatgtttaatagatgctggcgtatggcagcaactggaagtggttacccggtgcttgatgattttatagtttgggattatataggcaacaaaaatgagaagaattcaggcagtgggagacaatgttcttagcatgcacaaggccctaaatttgatcttaaaacttcctaaaaagaggaaggggagggggagaaaaagagaaattgattttcccaggagggctagtgtgctaagctaccatgaattacacgatgaagagcttgccaccaagcagtcataactagatggacaggacctcaattgttgctggtatcactgcgctggggcaagcatacaaattgtattactccctccatcaaacccatctctcccctctctcctctgctcctttccctccccctccttttccctccttggcccaattttctccatactttcccaccttctcctctttcttttgtccctcaaagaactatatttttgccaaatgcttaaggaaagaaaattcttggtcttagtgttagaggcaccttaaatttgcatgtgactttgttacttcactagatgaagttttttttctagtctcattggaatcctcttattctctcaaatgcttggtttctgtgccttttcccttctctccctctgccctagacatctttttaaacgtttccccttcggtcggtatctgctcagctcacctgagtttagccctttagccctgtcagctccggggtgtttgcgtgtctgttttgttttcttcccactcctgggaagttcgttgtactttattgtactttctccctctctcactgacattagtgagagaagcccgaagaccaagggagcttttggaggtaattgatactccgcagggtcaagtcaaagttattttgttgagcagaaaaagtatgaagagttaatgaagagttaaggcaaaaaaaacaaaaacagaaacaaaacccttatctgtctggtcagtgttaggtcaagggtgtagtcagaaggaatttgtgggtgcagtataatatcaccaccaccagagcttggagccagtagtggtaacaagagagtcaagatggctttcaacaggctaaaggccggatgctaataatgtacgtgaaatgggtctggggtcttaggaagacagcttaagtctgtgaagacctcgccttacaagcatgaggtcctgattttgatccccagaaaccccatgaggaggttggtgcagtgacacatgcttgagatcccactgctggggaacgagatggatctcacgtacattaaagataatgttctcagaggaagctagatacgtgtcatatcatggcagcacggtggcacagcctgcaatcccagctcttggagctgggaggcaagaggattgtgagtttcaggccagtctgagctacaagagaccctatcttaaagcatcaaaaaaaaaaaaaagaaagaaaaaattaaaaaatgataccatgtgtgattgttattctgtcttatgtaaagatcaaaaggaatcaaaaccaaaatgcacatgtccatcattcacgcatgtttcttagccatgcaccaaaatgttgctgggtcatttagttcgttctgcagtgttcagattgaatccagagcctgctacatgctaggcaaatgctgtactactgagtaatgaacccagcacaccagcaattatctcaacaatgtttacattatctgcagtatatatatatatacatatatatgtgtgtgtgtgtatgtatatatatatatgtatgtatgtgtgtctgtgtgtatgtatatatatatatacatatatatatacatatatatataacttttctgatgagatacattacttttctgatttataatacaaacacgatattgaaggataagctggctttccttaagtttttgtttaaatcgcctgtgcttctgtaggatcatattcattttcttccttccttctctccctcctctttcttactgtgttttgttttgtttctgattgggaaggtttgggaggaggatcgtacaagagctgtagaatgaagcctggaagcataaggaactcaatcccatcacacagaagcaagcattgctaagactgtcctgggagctgcctttctatgatgctctagtgtataaagtggatgtgagcctagtcaattggaactgaaatcacaaaggagtatggcttccctaagtcgttccctgtttgtttgtgtgtctctctagcttctctgccttcctcttttatattttcctctcttgtcctcttttgtgcttttctttctcatttccctttctttctttattccttccttttgccagcaaacactaagtttccactgtatgctagatgccttatacatccggtgtttccttctatcagaaatattgaagcaggatgactcagtggttagaaatatttttaaaaatatgtgtgtgtcttcaaaacttacttttcacccggaaaatgctagttaaacccattctgagccagcattcccaaggaccccgtggaatcatagcattctggatgttcatgctggtgctgtttgtgctgctaaggcctagagcagcattctcagccttcctaatgctgtgaccctttaatacagttcctcatgttgtggtgaccccaaaccatgacattatttggttgctacttcataactgtaatttttctactatcatgaatcataatataaacatctgatatgtgggatatattataggcaaccccaagggggtcatgacacacaggttgagaactgcttggggtgggagctctgctgatgctactctgtgcaagctgtaagagtctaagctgaacgaggcctagggtggcctagatgataaacatctctaaggaaagacctatatagctgctccctgacataaatctgataatggcatgcaggaagtccttctccagttctgagtccctgaagggaacataggttctgaggaagaggcagctcagagctcttgttcctatagaggaaccagattcaagtttcagctcactggcggcctcttctggcttccaagtataccaggcacacatacagtgcacagacatacacaggcaaaatacagaaatccttcagaaacggttaaggggaatgattaaaaggctcatgttcttcagtgcttgtataaaagtgttcatagttttgttttttcatttctgaatcattacagtaaaatggcaaaagcgggccaggtaagtggcagttgtctgaactagaagttcaaggccacataggcagcatattttttattaatatattaatttactttacatcccagtcacagcttcctctcttctctcctcatctttccttcccgcaaccctcccaccatcccttttctgagacaaggctcagaaaaatagagacctcccatggatataatccctcctaggcatatcaagttgcagtaggactaggcatattttctcctattgtgtctaggcaaggcagcccagttaggggacagggatccaaaggcaggcaacagagtcagagacggctcccgctgttaggagtcccacgtgaagaccgagctgcacaaccgttacatagggtagcagatttttaaaggcaattttagtaccacatatagaaattaaaagcaagatattttcctctttctctgtctctttctctgtctctgtctctgtctctctctctctctctctctctctgtgtgtgtgtgtgtgtgtgtgtgtatgtgtgtgtgtgtttattctcaattcttccaatatgtcaagtttctaaagaaagcaaagttcaagtcagtggtaaaatttggttaagttttggttaaaatggtagccactagcctatcatgtttttatttccctactcctcccttccacacacactccattgtgcaatgtttagattaccaagactggtggcttaatactttgagaaatttttggctgatttatcatggccctgacatcagaagcctactctttatttataattgaaacaagcacgttgtttcagagtatgacatcgatacccctcgcaattattatgtggacttaagactgcttgggtttgttttgtcattcacacatagtgggtaaggaggagctgcttgaaggcccgagttcctgatctccttttggtgactgtcactcaccatgtcctgtatgggatggccttctttaagcacacgctgaggtggagcggggcatcactgttgatatcgactagagaaaaacatagacatgtgggattgacccacaggtacacctatcatctgaacttggttgtgacatttcttctcttgatctgactctcttgcccttttcccatgaaatactgaaaaagaagataaaaactgaatccttgcatttctactgcagaattaaaacattcatctatggcatttttgagagccaaaatttgaaacatgaattgcatcaaaataatgttggaattcattcttagtgggatctgtactccattaggatgataggagcctgggaattaactttcagtccaagttctttgccctgtggtttgatgaagatgattgcttgcagctaagttaacagcttggaattcataaccttcacccaagtggttcttagcattcacgtttctagacctccttcatcaccgtcttcttctcgttaaaagtaccgggggggggggctgaaaagagagcatgatgttgaagagtctggctgctcttccagaggactcaggttcaattccctagcaccccatgacctctcacaactgtccacaatgtcagtcccaggggaaccagcaccctttctggtctccatgggcagtgggcactcatgggtacacagacagacatacagacaaaacactcatacacataaaataagtgtatacataatttaagaaaatcgcattagcgatcctgagaattggactgcatataaatgtgtgtccgtgcactcattcatttgcaaatcacacacctgtacttccttacactttatttcatatatcctataagttaacatacatcacagaaacttttaattataagaaataagcaatgctgataacaattggatggcatatactaacagtatagtgaaaggtcactttaaaataacaagccttcaatatgcttttctaagataacattgtaacaattatttaggctgatttcaaattcatttcaatctcatctagtaattatgtggaaattgttgaaatttactggtaattttcttttacacttagtacttgaaataatatttgtatattttggtatttcatacagttcttgttcttgatggttagttttctagacaagtctctgtagcacaaactggcctggaactcattatataacccaggctagcctcaaactcctaacagtctttctgccacgccctactgagtgctagtattgcagacatgagctcccttgctctggatgtttgttaaagctcaaagtactggtattgttggtataacagtgttaatgtggatccgatcagcatgtagtcccccgacctcttctctctctttttgtactcttcagtgtccctcttcattcctaacactctctgtgttcattttatctctacatgcaagcacctgtctgtgctccaaacacacacagagacaaccttcctccctctccttccacacacacacacacacacacacacacacacacacacacacacacactgatgaagagggagccctcaataggtagcttatctttatatgggggaagaagagttagtgtactgaacgaccctcttccaaagtggaagagttacccagcttctgtgagcgctgcatgggcggatctctaaacactacaggaagatctgagaacctttctggaccccgcacatcccgggttgcagtaggaaggctcactggatggaaacaaagagacagctctgggagcgtccctagctaataggttaggtttggaactgctgagtgttcttacggctgctgctcagtttgtgaagcatttggtgctcttccagcttctgtgtagcaatcgaaagtgatttcaagctaatgttcccttggatctgggaagatggctcattccatgaagtgcttgcactcaagcatgaaaccatgagtttgaatccctaacaccacataagagccggggcagtggcaggcatttgtgatcccagcacttagggggctctgactgggagacagccagctccatcgagctcattgactcgtcagcccggccaaactgatgcactccatgtttatcatctcaaaaactacatgaagcctgactgaagaagacctcctgggctccaagcacatacatcacacacacacacacacacacacacatgttcgcacctacacatgataacacatactttccttaaagtgctggtgtatcctgtattcccttaccacattttttttaaaagtacactaccactgagataaaccaccagcccccacttagcacattttgtacaggtgctgtaacatgccaaatacagttattggctctataaatgtgctcgtgaccaaaatgacagcaacaagccctaaaatacccctgtagagctggtattttaccagaggggaccaaaaagttaatatttgtccatcatattaggtatcgttgctgctgaggagaagatcgacagaggtggatagcaagagtgtcaaagaggtgttgaggtttcaatgtgatgaccgtaatcatcaaaggccttgttgagaaagggacagcttaggaaagagctaaaagaggtgacaaataagctgtgcaggaaaaaaggtctgtagagtttgttttacctgaaatgaatagcaaaggtcctgaagaagctgtatgcacacgtgtagtgtttgaggattggtgaggctcatgtgggcactcaagtccaacatgtgggataagggaggcacagtggggaagagtttgatacaccagccgggctttcagtctggacagcatacgtcagtatagccagtatctgtatggatgcaagttgcacgaactggccgatggaatgagatcacaggagagaactcctgttctgagaactctaggattccttacatttaaaaattagagctttgagaagtaatcagtcaaagaagcagatgcactggcttccttcctttagattaaaccctgtgttagcatgtgaaaatctccatacactgaccaacgtgtgttttaaaatatatctcatactttttctttttgattctctctcttctccctccactcccatgtgttctggtgtgtgtgtgtgtgtgtgtgtgtgtgtgtgtgtgtgtgtgtgtgtacagggagtgaatccaaggctttacacatgctgagcctgtgagttacatccctagtcttctgttctttgaaacacttttttctcctattgaccatacctctctaagattcagcttacctatgaattccccgacagtctgccagatgatgtagttccctcttctgtgtgtctcccatcccccacataacccaagcatcacacagctctcccaattgccttgctcccattgttgcatgaaacacttggttccttccctctgggtctatgccacttatttatatatctctgtggcaggttattgtacagtcctcgtgggtctgtgttctagtcactgtttaatgcctaactcaaatgcagattacttggttggaacttaaataatgtttatataataagttggaaaaccacttctaaataaagtagccaaagtagagaagcttatgtaagctcagccttggcacctgggcttcaagctgggctgcagggcaggtgtttgtaaagagatggtggtctttgggcttcagaggaagtaagaaacacacccgggggccagccctcaccagcattccctagcagcagggctttctagatgcagtggcctgagtaatttctttttctgccctgtgtactgaaaagctttctgttgggaacgtgttttaccaagtaggtagaagcaagtacagaggcttgctatttgaaagtgtatctgtgtaacatttttggaatacttgattgccttgttatttttgtctgtttttgttttgtgttaataaattaccccaaccagtctgttgggtgttagaacacttcaacttccatagggatgcaaataactgggcaatttcaaatcaagatttccatactgggtatgagccttgccatgagtcatagagttgttactaaaccctcacaggagcgtggcttggcagtagaagggtggagacagattgaaaagccaaaagattttaaggaatttaaggagtacactctaaaaaaggtgttagcaggagtgtggtttcgttgtttatgtgtgcattaaatgaatatatgagaattgaatcacattttaaaatatgttgtaaattttgctccaaattaaaacactcttgctttggcatgagcttaactatttacaaggtgagacagatatgccctctttgttctcattgggtacagctgaactgcgtgtcaaatggcaagtgaccctgataggcacaattgaaagagagttcaaagataaaagctcttgagtcttttaccctgaacattatcctctatgtagtgttcttcatttttaaagtgttttaagtaaagttcatattttcactttctaaaatgtgtttctaataattcaccaaaaatatgctgaattgtatatttttaaagagaatctgttttgaaaaaattccaaaatatttgtttgaacaggcactcaacatctcgatgaaaacggttggaaaagaaaagctttcaaagccattctgttctcagagtacccaagccaactaaactggtacagttaacgcgccagccagaggcaggagccaaggcctaacacttcccggactgctttgcagcagaccttcaaaccaacctagtggttagatgttaatgccgttgaattccagagtaaacagtgacaagaagaccatctatacctctttctatcaatattagtcctttagtagcccaagtatctgcctaaagttaacattcttgagttttgtggggcactgatcctgctggaaaatcctgtagagtgtgagcttcctaacgtagtatctctgagatgcctgtgtgcatgcgtgtgcatgcacgcgtgtgcatgcgtgttttggaggctagagtcagtgctgactgaatatcttcctccactgccctccgccttatctcttgagaccctggagctcatcagcttgcctagatgggctagggctagccagtgggctccggtgcttcatccgtttctacctcctccccagagctggggttaaagccgtgtccctgtgcttgcctgtgtgtcctgcagatctaattgcagttcctcatactgtgcagcaagcactttactaactggaccatcgccctagccctcagatatcaatatttgttcatcacctttaagaatcactatcatggtagaagtagaaataatacatcatatcgtaacacttttgagagattggtggttatattaggctgccaaatatatatgtagtgattgtttagcctctggcccactcatttttactatatcccccttataatttattaatagcacttaatgcatttgccagtatgtttgatatgctatgttgatctctctgcccatggctttacttttataaatgctcttgttactattcatgaaattgactagttgatacctactatatttgaatgttgtcatggagaataaatagcaagtgactcaaatgttctgtatgtcagttagaaggctaaactcaactaccgtttcttaggtatcagagtttgttagaaaagtagcagaaatgaaactttcttgggggtttgttttcttttgttttcccattgtttttaccaatgtgtaagagtaacagccacagtttggggcacagcgctgtttcctgcttctaagaggctgagacttggtggagccatgcgattctcccttgtctctccattttggagtgctcgttctgggaaagttagaaaacacctgagggaggttcagatggcgctgaagggctgactggagatgatggttgaaagctagaatctgcggttcatcaggacatagtgaggaaggacacgaacataaatattaggacattagagtacgttaccaggatccaaggaaagtccatgaggcaaagctctccggtgctgccatgttccatttgacccagtttggatccccacacaaagagagaggttgaggtcactggtccttaggacatgatgtttgtcaaaggaaatgactttggcctatagaggaaggagtggagtgccctcttcagtaaaaggacattcggtctataatttctctgattcagtgccagagtattttaaaaaactaatcaaagcagtttctctctcacttaaatcgttggagacccacagctgatacattttgttttcctttgcaaatttctctttaatgacttctctagtgttttctgctgtctttcctctgttggtaaatttccttaagcttcaagagtgtttaaagtaaaagtaagtatcatgagacaagaactgtattttatgggtaggataatgcttctcctgtgacgttttcttttcccaccaaaagtgagaagcgcatgcctttccttggtgcgcccgcccgcttcacatggaggacaggagattattctctacaatggctgacttccagaattcttgcctgaatgttttttgtcaagtatatattcccttctttaggcctttctatatagagcctaccaacattgtcaatgtgaatgatgtcattcagagggttagtgaccatgctgctgctatgaacaagcggattcattactacagccggctcaccactcctgcagacaaggcactggtaaggagcaaagctctgctttttgtctagagttcagttgtaatgaacagtaaacaccaaaaccagggcaactcccaggggttgaacttttcactggaggagtccaaagatagcatcatgcaaagtcaaagcaatagtagttaatacgtgcttcaggcttgttcattcttatctgccctggagtagagacatttggaacgatctgtttgacaatagcttggagctttaatttttttcttatctcagataccaaaagctctgaggaagacaaattgcttttgaaatagcagcttagataaaaacataaggttctggctagtctctaaatttaacttctaaatttgaagctacaaagaaaaattatttatatacattttctataggaataagaaacaaatttgttcatacacatacctgatagtttcctgattagtattgcaggtcacatagtatcacagttcattgttttgtcttataaacatttaagaaattattaggaaaaggctacaaattcaataaaggcctagtttacattatgggtcatgattgactaaattctgtcttatattttagaattttaaagtatgtaagtaatctgttgcttataatggtgatcatatgtgagatactcagaaatttgaaagcttaaaaactctggttaaaatgggtctgagaatccaaaaggaaccagctctgcccttcactagatgcctaccaaggagaagtgggtaccacctgaccatggctgtctgatgtcacccccttaatggctgcgtgaggtcagcatgcagacctccttgactctgcttatttgggcagcatctcatgaagtccaagctgacctccaactctgtgtgtatggagagggaccttaaacccgagcttcctacttcatctccttggtttatagcacaaaccaccatacctgggctctaagattgaaagcaaagacttatgaaatgccatacggaggatcaattttcgtagttttaattttttttttatttttacctgccccacgggccctttacattcgtagtgatggtgaagtgcattatagaattatataaatccttcgggccttgagatcccaggctgattcagcctcccagaggctgtacttttagaagcaggcgtcagagataccatctggagctggatgggcagcactacctggaagtaaagccaacaccgcacactgagtcataaccctctgttataacgatggcactgagagagacgactagtgcatctaaccagttgccaaggttaattgatctctccacttgtaacgaatttgtataaacatccacactcatgttctaaaaacccccaagtcactttccctaacggggtgttttggagaagaacaataaatcactgctcatagagtaaaggctcttcatttatggaagaaatgctattattattattattattattattattattattattattattattctaagctggaaaggggaggaagctgcctgccagcatcccctgtgtccttgctactaaacgcacctgcctacagagcagccttgtcagtgtcactgagggcttagcaaaaaggcactgtgcagggcttagtcggagccagggaagcacgggctgcctgtcagcaagagcctgtgtgtcatgagaatgttcagagggagatgctgccccacaccactgccactgccactgccacgctgtgatcttgcctgttcccgtgcctcctcagcatctgccactcttcccacccccatcctccacatcttcccgggcacgagccagacccagaggctaacacagggcacaggactaggtgaggtgtacatggaataggtttattcttccattttgtgttaggacagtgtaagaccacaaccagaatttttctacctcgtattgaaccatgctccttatgagttttgatttgaattgttttgttattgttgttgctatttcggtttttttttttcccattcgttttgtcagctatactgtttttccttcttgatggggcgttcatagtcttgcactttttctttgctcatgggaaaaggaaatatcgtctaggtcatagagaaaagtaaataaacagaaggaaaaacacaattttcatctgtgtttttatctgtgtctctaagaactagctgtccctgaatccacaccatgcatagcattcaggatattcttccctacaaagtcaccactcattgtattgcattgaaagagaaagctatgccatttctgtgatcatagcctattccctttttcccactaaggcctcatactccacgtcttccgtcaagcgttccctggttctccttgcttacccagtgagatagcacagcacagagttgaacccttcattgtattgtgtctcctaatctcatctaattgcttcgtgtgtccaactggaattcgagaccgtttgaggctgttaactttactctcaaataagaaacatagcacgaagttatgagctatttcttcatttactgtgcattggcacctcaatcctttagtctgagatccctgtctgtttcctagatgaccatcttcacctcagagttaggtaaacaccactttgttcttgaaaagctcttcaattgaggacagcctcctccttggagatttctttaattactggcttcctactttctcatgaatgtgaaaagtactttgatgatagaaataacttatttctcctttatacccgctgctatatttgaaaaaataatcatggatgcataatgctaaatgcttatgtgacttagaaacatatattaagatgtgtcttaaagatatgcatgctggtagctttttataatctcaacactcatgcagcagaggcagggggatcacagctttgagacgggaagggaggtgtgtaatagtcaagagtctcactggcagctgtcctcagaggagcccaccaagcagagcccccagctggtccagccccgtgtaaatctcagaagtgtgtctactcagtttcattaatcaacagaaaacatcctttttgtccatacactggttctgatatttctcttttcttttccccaagattgctccagaccatgtcgtccctgctccagaggaatgctatgtgtatagtccattgggctctgcctataaactcaagagttacactgaaggctatggtaaaaacaccagcttagttactatgtgagtaaactacctcttggagcatgaattaaactgcgtgaatgaagataactggctgtttacttctgtcttaattaaaatgcttgaggagcctgacctcatagtgttcctgctattactctttcagttttatgatttggaataccatgatgggaacatctatactaagtattccttggggcataaaacaggtaatataacttttgagtacacttttatctaaaaatatcttaagatttattattttttatttttaattatgcatattagcaagtctgagagtgggtgtttgcatataaccccctgtgcccatgggggtcagaggcgctggaccttcctggaactggggtttcaggcagttgtgagccacccaacatgggtgcagtgaggcaggcttcagtgctctgaaaggccagaatgcattcagaactgctgagccatctcttcaacccccgaggatttttccatacctataatcccaacacttaggctaaggaactcatggattgtgagttcaagaccagtttgggctacatagtaaattttaagctagcctgtgtaaataaatgaataaccgcactggaaaagaaaatgatcactatattttgttttattacttacataaaattctctttagaaagttgatggttctgtttatttttccactagcgtgtttttgtcagaattgtttagggtatcagtgtaattgcatatgaagttattcttacacaacaaaaggaacctgactttttatttttaaaaaggctggatttaccactgggatgtgtgtcatcgtgctgatgggccttctaacactttactgctgctatagagtggtgaagtcacggagtacgataagtaagtagagacaggtttttgtgggaaataatgcactctcctatgaggcagatcctactgtgtacattctatatatgtgtctccttctaccttttctgtgtgtgtgtgtgtgtgtgtgtgtgtgtgtgtgtgtgtgtgtgtgtgtgtgtgtgtgtagggtaaaggacagcttgaaggtatcagttttctcctactgtgaggttctctggaatagcagctccctaacttaagctcctgctggccccagctggctcgctctgaaattctgggctgagcattctttggagaagacaattatattatattatattatattatattatattatattatattatattatattacattatattagggcgtgtgtcttttagggcctagacaggcatggttttccttcagccatattagcaaatgcaaaccaacttctagttgtttctgtctaagcagctctttctccagttaagcagagtctgtcactggggagtttgttgtcactgtttgagatcttgggagaagccttgtttaaaagccattcagtctcctggttgagtttgtttagcctttggtttctgtgggttttgtgctgactgaaagggaagagagctctttatacaaatgcagagagtgggaattttacttcaggctgtctgcctggcaagcctcctctgcctgctacagagcaggtaatgcctgcctttcctaaactcttccatttaaaggaatgaacttgcatcagttcattttacaaagacagcacaagcctaatacaaggccgcacaggacaaaaaaataaaagaaaaacaaacttacaaaatgtttgaatcagtagtgtaaaaaaataatatcctgtgtttaaaataggatgtgtttaaaatgtgtttattctagcgaggggggaggacactttgttattaggaagccaaacacagttcactgcactaacaaaatcaaggtaaagtccagcgttgcatcaattgtcagccaccccacaaaaacagccatcggatggtggcaagcatcctttatcttgtaaagctctaaggaaagcgcgacttacacaaattacagtttctgtatcccaaaccaggaccagcagctctacagtgataaaatgcctagagctgtttccatttaagtcaaagaagaggaggaggaggaagaaggggaggaagaagaagaggaagaagaggacgaagtcctaggaaatgctcatgatgactcctagctgtctgacatagtatcaatacaccaaagaatgttgagctatcataaaaactagaacagactaataattacagcaaaagaatgcatcacaatgccgacgtgcgattagaattaataagaatctgaatgttaactgcctatgaaatcaatcagcagctagaactacagtgcagagaacattattccactcaccacagcagtcaactctaaaggacgtagataaaatttagcaagagaacacatttgatgggaaaaaatatatatagtctacctcaacacaaagaataaaaatctgcgcaagtaagaaaaacatgccatgtggtttggaagattcagtatggcaagccacaaaaagccacatgtataaattcagtcccatttcaaacagagccagggaaattaaggaggaaaaagaagtggtgtggaagaatgagaccgaccaggtactgagacatactatggagcaaccgtaataaagcagaggacgactgccttagagacaggaataccagagaggacggacgggatagacaggcggctgctgcttaaaagctcttactgctcttctagaggacccaggtttggttcctggcacctacatctcgtagctctctgacctctagttcttggagatcaaatgccttgatctgacctcagggactacatggtagagaaattcaggcaaaacatccatacacatggaataaaaatgtttaatctttataaaattagactggaaaaggaaacatgaatctcaggtttatgagtttaatgtcatatttgatgtctgttaaactgagtatctgctctgtgtgtgtgtgtgtgtgtgtgtgtgtgaaagtgtctgtgtgtgtgtgtctctctgtgtgtgtgtctgtgtgcctgtgtgtgtgtgactctgtgtatgtgtgtgtgtgtgtgtgtgtgtgtgtgtgtctgtgtgtgtgtgagtgtctgtgtgtgtgtgtctttgtgtgtgtgtgagtgtctgtgtctgtgtgtgtgtgtgagagtgtctgtgtgtgtgtctctctgtgtgtctgtgtgtgtgtgactctgtgtgtgtgtgtgggggggggaactctgtatgataccttatacaaaaatatactccagatggcattctaactaaaatatgaaaaaataaatccataaagatattagaaaagagccgggcctttaatcccagcacaggcggatttctgagttcaaggccagcctggtctacagagtgagttccaggacagccagagctatacagagaaaccctgtcttgaaaaactcaaaaaataaaaaaaaagatattagaaaagatgtaggagattgcacatataaactagcaattgagatttttcctgatcaatgcagacgatatagcatctttaaaagaagtatatcacaaaatcgcaggtcattaccagaaatcatcctggtaaggtaatcaagaggacatttgtaggagccacatccctccaaggtggagtccgtgctttaggtaacctgcagagaaaacaaatccatgactaccgtgtatagcagttacggtgaaactctccacccggacattaacgatacaactgctaatcaacgagacggctctcatccgtcattcatgaagaaaagttcctgtgctgtatctatagataagcttgttatctgtattcttcagagtccagcatgattggacatttataggctaaaagtgtttttatcctatctttgaggtggtttatttttattctagacaccccaatgtttataagaatgctattggagtagaaccataaaaacacatatattggacaagatttgggggctaggtcagtactttactgctcctacgtatatactaccatataatacacacagacagacacattatatccctcatttctctccacccccacccctgggaaacaagatgagtcataaagtaactataatttgagggcagttaaaataaccttgtcttagacctctttgtgttcttattccttactgagatattgaaacaaagaaattgctatcgcaataatccaaccatagaaatataagtatttttgtgtatgttcttatgtaaatgtctttgtattctttttatcataaattcttaaatatttttgttctttcttatacaaatgtctttgtgttcttttatcatttagtatgttttcttacagtcttggctcccacttcatcactttttttttaagtgaactttatgggtgcagtcaccattattacctttgtttgttgtttggtttgttgaatgactgtgcattataccttgtggctctgttgtattgattaacagttgtggactgctgcatgattacaccctggtctgttgtttactatcctaagagatacccttctaaaataatgtatgcatattttatgtattcttttggattgcttcatttaaattttgaccccaaagggggaaaagtcatgggctggagatatggccaagtggcagagcacatacttagcatgtgcaaagccatttgggttcaatcaccagttcggaaggaatggagggagggagggagggaggaaggaaggagggaaggacaaccactaaatttaaatttatttctaagagctgtagtaatttccagtggttccagctatacatgaatgataggctgctttgaagcatgttattttgtgtttccagttttgttctgttctgttttcttttctttctttttttttctttttggcagggtttctctgtatagccctggatgtcctggaactcactctgtagaccaggctggcctcgaactcagaaatccgcttgcctctgcttgcaaagtggtatggctttctttaagtgtattgtttgttcatcctctcttcccagttgtccgtgagtctttatagtttatgagtgcctttatagttgttctcagtaccctctatgacgttgctgttagtttcctgtctacaagttcctgtggcttcctttctcactctgtctgaatggcttctgtgagactttctgtttccctgttaccgtttcctcagttcagagacaggctagcctttcatctgagacttcaatgctgtgactgtaatgtgttaatcttgtgctgttgtttttgtcttgctctgtttatgtttttcatgctgttcagaaactcactgtgtagcccaggctggcctggagttttcctgtttctgcctcagcatcctgaagtctagaattacaggtgtgcgtttccatgctttacttttaaattcttaacttagttatctaacatttaaattggcttatagcataaaatatgactcaaggcagctttcactcatgtcaaacagtgcttaactgttacgtagagttttaaatgaactgacggggtgatgtacgcctgcaatcccagaaacctgggaggttgaggattgctgtgagtttggagttagcgtgggctgtgtagcaagacaccgtctccttacaactaaaaagagagtgtgtgttcgatttccttctaattagttttcccactcttggttatcacatgctctaattcgttataaaaagttaggatcctagttgtttctctgattatgctatttcactgaacagatttctattttattgtataatattttattgctatttttttccataatgtgttcttgtatttgttggtaaagtagccacactattttgctaaatattttgagttaattgggggaaatcaaattatgaatgtggagtgtataacagtacctagtctcattctttctctttcatttttatctaggtacatcggacacgagtacctgggaatatccagatgtctgcaaacattattttggctcctttgggcaatggtcaagtctccttttctccttggtgtcgctcattggagcaatgatagtttattgggtgcttatgtctaattttctttttaatactggaaagtttatttttagtaagtattggtctagcctttaacacagttactctcaaatatcattgtaatattttagttctagcctcacatttttttatgtaaagtattataaatcctggataatgcacttgattaggcttttctatgctcaaatgttgtgtgtataaacatgaattttttacatagataatgggtttcattctgacattttcataatgtatttcaatcatatgcacttcctgttcattcatatgcacttcctgttcaatcatatgcacttcctgttcaatcatatgcacttcctgtttaatcatatgcacttcctgttcgatcatatgcacttcctgttcaatcatatgcacttcctgttcgatcatatgcacttcctgttcgatcatatgcacttcctgttcgatcatatgcacttcctgttcaatcatatgcacttcctgttcaatcatatgcacttcctgttctgctccccttttcccctttcctcctccctgctagactcctcctactttgatgcctttctttttgtcccccagtgagtttcactggggttgctcacatcatttccaggaacatgggtgagagcttgtctgctcacgcacccacgcttcagcagtgtctgcaccactggannnnnnnnnnnnnnnnnnnntgtgtgtataaacatggaattttttacatagaataatgggtttcattctgacattttcataatgtatttcaatcatatgcacttcctgttcattcatatgcacttcctgtttaatcatatgcacttcctgttcaatcatatgcacttcctgtttaatcatatgcacttcctgttcaatcatatgcacttcctgttcaaacatatgcacttcctgttctgctcccctgttcccctttcctcctccctgctagactcctcctactttgatgcctttctttttgtcccccagtgagtttcactggggttgctcacatcatttccaggaacatgggtgagagcttgtctgctcacgcacccacgcttcagcagtgtctgcaccactggacagccacactgtctctccctccccatcaggggttgcctgttggaagtgtcttgaccatccagccttaggaagttagtcacaactgctgtgcattcagagtgcacaatcatatcatgcccagaagttaccttgccgtctgcccctgacgtcctctgtctcctaagggatttggggtttggtgtgtgtgtgttggttttgttttgatttgatttgatttgttgttctacggagggcattaaatggccaagtcaagcacttttcataatggcttttaattggatggaagatgtccattttaagcttcctttttggcatttatttgtattgtgtatgggtgggtacacacatgccagggcatgtgtgagaagtcagaggagaactttgggaataggttttctccatcttccacttgggtttttgagcatctaagactgatgatttatactaaccatgtatccaccattgtgttgtcaatgtcttaatagcttgtattcacttctatgcagtgattctaggcagatcttttttttaaaccttcaaattcgtttttttagttttttttttttcattaagattcgtcttttatatatatattagagtagaccaacttgtcaaattctataacaatataatcagatcttgattgaaattgcattgaatttttcagtcaacataccgtaattaatatcattaagctattgatttaggattaatcagaattgcattgagtttataggtatgggaagaaaataccctaggatattgttttcctatccatgatcatagcagagtttaaatttctgtttaatgtctttcacatttttcttgctgaaagtcttacatactttagaaatagtttttccttaatttggctttgtaaatgtagtttcagtctattataagactcatactttttgttataaaaaaattcagacatgtacaaaataaacagaatgatacaaggaatctgcatattcctcacatgagtgtgacagctgccaacattcttctgttcccatagtctgtagcagggttttctagttccccacttctaaaaaaattattgccccttgagaacactttttagacattttattccaattgatgcttcagtgaatttttaatatcacctttaataaacggtatatctccacattatgtctcttaaaagtaattttttcctcccttcaggaatgactttttctccttgaaaatgatatcacatgcattgagaaagcatgggctatgaaatactccgcacactctaattcaaacgttaaagtatctgtagttatgtttgtttcttaggtagtaagcatgaccctgtgccaaacaaacagcaatgtctggctgagcacacagcttacccatcgcacacgagtgcttgggcgcctgcatgcgcctgtaccctttggtgcttcctctggtgtaactccacagttcttacaagcgcattagttactatacagccttggctttctaaaagcatttactgtatcttatgaaagctttaagtgacttcccaaataggctcggccaggtatgcttgttggcttcccttttggcagacttgagaacataaaatgtagctatcctccaataaatcagtgtaaatatcagaaatcattggatacattatcttccttccaagctttttgaccacgattaattcagtcttgtgagtaggtttttttgtttttttaaaccttatataaaattattatgtaaattttttctacatggcactataaagcaaatgacatttctttcgtgtaggcaaagaagactaaaagtgaaatatgtaacgctgaagtagttgggggtcagtgtactcagtgatactatatgaggaaaataactacttttataaacaaaagacttcagatggcgatgggatttggcgtggttcattcattgtctaattacatgtttatctttaacttttagattttattcatcacattaatgacacagacactgtactgagcaccaataatagcaaccctggtaagtagcttggaattcagtttgtttccttgtccccattcctgctcccgaaaggacttaaaaatagaatccatgaccccatttaaggtaaatggttggggaaaaaaatgttattatgttactgagtcactattaaattattagtgttatgtttcggaataggtgtatctattaaaaacaagtggttgagtgtgacttcctggtgcggcacctgcctggcaagtgaagcattggctctgaccgtcagccccatgaaagaataaagattaaacagagcattaaaatgagatatcccaagggcaacaggcctgacaacctgactttggccccatggacctacatggctgagtaaggaactgtggcacagcaaataggtgatagaaagatagatagatagatagatagatagatagatagatagatagatagatagatagcaaataggtgatagaaagatagatagatagatagatagatagatagatagatagatagatagcaaataggcgataaatagatagatagatagatagatagatagatagatagatagatagatagatagaggtgatagatagatagatagatagatagatagatagatagatagatagatagatagatagaggtgatagatagaggtgatagatagatagatagatagatagatagatagatagatagatagatagatagatagataaatagatagacagacagatgctgagagagaagagaggaagggggcaaagagaaacacattgtccaggctcccagttctcagggtcccatctagactcttaggctgctctcgatgtccaggctcccagttctcagggtactatctagactcttaggctgctctccatgcagtgaactgcagaattagtttgacttgttcacattctccaaattcttccattcttcaccaatgagtgaggatttctgcttttaattccctaacacatagattgctttttattgatattgttgttattaagaaaagaaaaagaaagggccagtgaaatgggtcagtagatgaaggtccttgaagcaagtctgatgacctgagttgagtcccaagacctgtacagtggagggcaagcattgactctgctaagttgtcctgtgacctcttcacatgagctgtgacaaacatgcacacatgcaaataataactctaatatatttttaaaagagaaaatcttgttagttagcctttgtatggctaatagtgcaacaattactctgcatgagatttcctgtgttattgagattccataagtccagtatgttcagtccaacaatggggccaaggaacattctataggtgccttctctggttcctaatataagtgcatgctacctcaaaacttttgaacaattccctaacctttcactatttatgtttgggtgaaagattcctaaagtgggggtgggggtgagggggagcacgagcaccatttctagtcattttcaaagcttctcaaactgattctcacaggccaggcccctggacccccacctctgccctgggttggtagcgtatgtctatcttgatggaagagcagttgatgctctcagggaatttaatgaagaaggagctctatctatactacagcagctcaaagaaagtgacttatctctggttcagaacaacagtgcattttatgtggagttctgaaaacccacagacaaagagagaaacaagacagcaaggtgcaggggtccacaaagatgaggcaaagaccaaggccttgcttgagaggactggttagactttggatgtaaccacagggcagaggaagtacagtggtcctccaccagacagtgtgtactcgggtgtgcaacctggaactggaacagagggctttgtaggtcaaattccaggagacttgtctgaggatgagttggtgccccgtttagagaagactggtcctatctggggtctacgcctcgtgacggatccactctcagctgctgtccaggttatgggtgaagtgaatggagaagaaatagaaggggaagaagttgaaattgtcttagccaagccaccagacaagaaaaggaaagagcgccaggctgcccaacgggcctccagacgcagtgcacatgaagatgagggctatcaccctcctcccgaatgccacggccagtgagaggtcaagggcatggagggagaggtgggtaaggctcccctccagagtattatggctgtgaagacgatgatgatgattactgtggttatgattatcacgactatcatgaagatccctactgtggttatgatgatggctacgccataagaggaggagaaggaagggggtgaggtgctccaccaccaccaaggggtcgaggagcaccagctctaagaggtagagctggctcttcacagagggggggtgtacctttgggaccaccaagaggctcaaggtgtgtcagaggggatcctgcacaacagcagagaggccatggttcttgtagagctcgggacagtcgagggggcactgtcggaggcaaaagaaaggcagatgggtacaaccggcctgattccaaacatcgtcagaccaacaaccaacagaacggggttcccaactcatcgctcggcagccacttcagcaaggtggtaactattctggtaactatggttacaataatgacaaccaagaattttatcgggatacctgtggacaacagtggaaataaacctgcgagggcttgaaaacgattgtcaaggtccaattgactctagatcttcattcttcaaacaaaattagcataactttcatctttagcagtgtgctgccatttgtattcagctgaagaagtcactattgtgtatacactcaaagcttctttttttttttttttcttttcttgatgctcttaagcattattgggcctgcattcttctggggttacaatgcttttatccttccaagcatcatcctagttgcagaagaaactgttaaatcatgattttgcagaacctttggtttgaacagttgtggggtttttggacctggaatagagtacataggagtgtgaagtatgctgtaaataaaagcacaagccagtgctctgtcttagtagttttaagaaattaaagcaaacagacttaacatttccttgtattgaaagtaacctatgactgcatgttttgcattcctagaagcaggttaagtatgtttgtaagttgttataaccacacctctttaaaatctgcccctacaaaatttgtttggcttaaacatcaaagctgtgacaatttgttcttcaatgtgattgtatttccaatttcttgttcatgtaaaatatcaataaaactcaaaaatctattcaaaacgaacaaaaagatttctaaagtatgcatacgcttccaagaagggagcctgcattcatgctggcagctgagcaggtgccagtccctgggcacggtgactctccagctcgtgcgctctcagtctctgacctggcacgctcttgctttcacagtgatatgtccaaatgctggcagtggtggccgtcctgacaacagttccatgattttctacaacaacaacacagaagtgcagctgtttgagaagtggtgggacaagtccaggacagtgcccttctaccttatagggctcctcttgccgctgctcaacttcaagtctccttcattcttctccaaatttaatatcctgggtaagatactgctttgtgggacttcctgccagtggggtgacagtcacctcctactgttctgagctgcttaacttgttcattcatactatacttttgattctgttgccttttgttttttctgtaaagtttggcacaagaaaaaaaaaatggactcaaccatttcaggttcctttgctttgctttgttatgttttggtttttggtttggttttcctcataggaattactaggtttcccatctaaccgtctagaacaactcttacttcctgtgagaatgcagctagaggagatagactaaagtttgaggagatatcaaaataactcccatttaagagtattgcactgccaagtgattaatcccagcaccaaggagatggggcacaggagcaggagttcaaggccatccttggctacagagagaaccaagggggtgggcagacaggcattgcagagaattaccatctaactttaaacggagaagatcattctggagctgtttttcctcactcattcgctcatccatccatccatccatctgtgtggtctttgggatcaaacccagtgctttaaaagcaaacagaaaggcagcagggccttgtgcctgccgggcaatgcgctctactgctgagccctagctcggcttcttgggttcaacctgctctttgctcttcctcagttttgacttcatagtgcagttgcctccttaaaggaatggacctctgtgtgtgtgtcctgttctactgaaatctccaaaggaatattttaactctatttaagttgacagaaagagcaaaagtgtaacgctaggctctgacggtctccctcggagcagcgtggaagccagcatgagcacaaggagcggctccataagctcggcctcctgacttcatctttctgaaccagctaatctctcagcttagaggctcgctgtggttccctgacttgcttctgtctttccagtggaacgagtctttcacaagcgcatgaacttagagtttgcacagtgagacaccagcaggctcaggcttccatacagacttcttaaggacagtctgctgttgtcctccgtgccatttccccttcctcctaaaactgccacttccacagagcagcagcctcccagggcattcagaaacagctcggttgtcctccgtgatgactgcatcttctttctcaggagaaataacctggagttggagctatagctcatcgggttagcacttgcctggtggataccaaaaaggctctgagtttgattcccaatgctgcgaaaaacatttttttaattaaaagataagaattctctaattgctacactattaaaaattctgtatgacagagccacatgtagctgctagctcatgcattcaccctgagaaaatgcttgctatcttttttttctttttctttttttactttcttctcatttcaaattaacttggcaaacttttcaggtgtgttaggtatctcacaacactaaaaacaaaagaagttggtttcacggttttgttttgttttcgtttttcttgtataactgacaattgtgtgatggcctttgctcgttgcttccactgggttcctaatcggacggagcagttcccactcagtgggtggctcatggtctccctagtcttgggtccttaagtttatttactacccaattgtttcattctctgatagcccacgaggttaaactctttagaatctacctgagtttttctaaaaaaatcaatgaaaatagtttctgcagtccagatttttcaagtagtctgtaacatatgcaaagatgatgcatgctttctgggtttgcccgtttgtccttacaggcacagtatctgtcctctatttgatcaatggtttctgggtttgcccctttgtcccttacaggaacggtgtctgtcctctatttgattttcgttgttaccctgaaggctgttcgcttaggattccatctggaatttcactggtttgtgccaacagaattttttgtaccaggtgagtttgtcaaaataagaactcaatcactacataatgacagcgtgttctttaaggtgactgctatggactgtaagtctgaaacaggcaatagcaggataatatgctagctctcactgctgatatcagcacttgggaggcagagacagagtccagcctgggtcgtggagtaagatgtgcctcagaaaagcataaataaataaacaatacaggacaacagttggcatttcagacagctaaggataaccaaggttttattttcaactagacacttgaagtctatttaatttatagtgcccttaaaataacctaaagtttattctcaagacctttctagggaatgcatgctttggatgtcagagacgtaaaacatcgtaatgcatgtcgataatttgctcataaaaatcattgttcatagctgggcatgacggcacacgcctttaatcccagcacgcacaaggcagaggcaagcaggatcgctgcgactttgaggccagctggccttattgtgatttccaggccagccagggctacatagtatttgttgtgagatcctgtctacagaaagaaagatggaaagaaaaggagggagggagggagcaagcgagaggaagataactcattctccttataggtttttctgttagtcattttattgtttttcaggttaagatcacaattattaaatggattttatacctgtcccatttctcttcccgattatgatatgacaatttagttcacccaaatgtaaaagatgtatgacacttaaagaaaaaagcaccaataaaacaatgaataaatgaatgaatggctactaaatgagaaaaccgattaagaaatgaaaatgactgtctcacacacatcttgcacagtgatcatgagcgaatggcactgattctggtttagagactggtctgcgctccgccatcagctctagcagtctgcagtcccagtcactactcagaagcgggctgtgcttgtggagtttgtgcttggagctgtctctctctttgttgttgctgtttgtttgtttattataacttttgtaggttttcaagctgcattgagtaggtggttcctggaaactgttgattatgttactatggctacttgttctcagcacatttgactttattctctttgattttccaacgtactgagccttgaaagggcatacttctttcccggatggtgtgctggcacacacctttaatcccagcattggggaggaggaggaggcagctggatctctgtgagttccaggacagccaaagctacataattgagagaccctgtcacaaaaagacaaaaagaaaagaaaagaaaaaagaaaagcctactgacaatggcagtattgaattcttccactgattgacagaaatagtctaggatattgctttttcatattccatctattgttatttattaagcaatagtgagggaagtttctactaatgatagtacactaaaaataattagtggaactagagacaagatatagatagcaactaggagtatttgttgttctggcaaaggattcacacttggtttccagtacctccaaccacaagctgtaactccaacttcaagggaccagtgttctggtcctgcacccacaccacatactcacacagacacagttacacctgtgggtacctgtacccacatgaacatacttacacaacagaattatactaaacataaaataaatatgtttctaaaaatgtgtaaccagggaaaggaaaaatagtcacctgggaaacagaaaagaagaaatttctcagtagatagtgagtcattcattttccattgtccagttttataaagtacaaaggggaaacaacaaagattaaacaaggcatgttttcataattaggatcctaaaattactattagggactgtctgaaaaatgaagtgttctaagtgttttctgaaaagctaactaaataccagagccctggagagggtaagcctctactgtcctcatgagaaatcacacactgtgcaattctgatggaactttgtatattcttgtttcttttacaattattcattacactcatttatttatgtacataccacaggatgtgtgtggacatcacaggacaatttttgacactggttttcttcttcaacctgtgggttactgagtgtcctagtcagagtttctattgctgcaacaaaacaccaggaccaaaaagcaacttggggaggaaagggtttattttgcttatacttccacatcacagttcatcatcagaggaagtcaggacaggaactcaagcagggcaggaaagtccattctcatgggcccaactcacaccttctctgtctctgtctacgtccttgtctgtggctatgtcaagctcaaattgacgaagaccaaatacttacgtgtttaagtgtccatccctgtcagacaacctgtttgactcactcttctctcagactcctccagctttgttttccaattggtcaaacactccatagtctttgactgttctcatctacactcaatccacctgcaaagtctgtctgttttattttttaaaaaacagctgataacctgacttcttagcatctcaacccaaaagaactatgtccagctattaatctcttgcctggattacagtagtgtcctcctagctaatggtctgtcttctccactgaaaactattctacacccagcagttagagtaacccttgcaaatcaacccaagccagtttggtcatgcataccttaaaggctctggagtctaaggccagcctgaatgacatagtaaacctcatcttaagacaagaacaacaaaacacaaaccagaacccacaggaatctttaatgatttcacgtgtcattcagaatggcaccaggtctgtcatagtccttagagccagtctggtctgaccattcttctctttgacttgcctaccgctttccctctgactcacaccacattgcactggctgtcttgctgttgtatgttgcacattcctatctgagaatgttggcatttgcttttcccagcatatgaacgccctgtcttctcagatctccaactacctatccaccctcagtctccttgagaattctctttaaagctcttcccagcactaaatcttgtctgcaggtacctgtggtatctgttagtatgcctgattataatgagtcaggatcttggggggcccagcttactctggcccatttttgttcctgagtgttaccaagtagcagaagttgcagtaaaaggaacttagacagaaatgtttctcaatgttttgggttcttgaattctgatattgaaaatttattttctatttacatatctgtctcctttaactggaatattacactctgagaaaaggagtagcattcttgttttttttgttgttgttgttttgttttgttttgttttgtttttaaactactgtattactgtggtatttccaaatcctatcgatttcctggcacacactggtgctaataagagataagtgttgaaggtcagtgagctgactcaacaggtaaaggcacctgctgccaagcctgacgccctgagttcaatccccgagatccacacactccgaagagagaaccagctccctcaagttgtcgtctgactgccacactcacacacactcacacacacacacacacacacactcatacacacacacacactcatacacacacacacatcatacacacacactcatatatacacacacacatacacacacatacaaataaaataaaacaacaagctgtaaagaattattgactaagtaaatgcgtttatttgacttcctcctaagtgacattaaaatataagaggcatagtgaaggaagaactagggacaggctgcacaggaagccagagcaaactgcaagacgtaggcagatacccatggtggggtacaaagcatgtttgatgttttctatagattgagaggggagagctcacaatgcctgagtaaaattcgaggaagaactagtattaactagcattactagtattaactagcattactggtattaactagtattaactagcattactggtattaactagtattaactagcattactagtattaactagtatttactagcattactagtattaactagcattactggtattaactagcattactggtattaactagcattactagtattaactagtattttctagcattactagtattaactagcattactggtattaactagtattactagtatttagtaagggactgaaaaaagaagaaagttatttattttctccagaaaaacagctcaatgcacagcttactatgaattccatcataatcataaaaatgaatacctgatttttcaaatccaaattaagactctgattactcagcccctctgatccgtgttgactattagctccaactaccacgtgtggtttgtgtgctgctgagggtggacccagtcctccgtcattcttggcatgtgctttagtgactaaaccatgcccccccccaatggtgtctgccctttagctatttgtgtttggttgtgtttcccctcaccctggggggaaagggagcagacagggttttatgtagcttagctggcctaatgtactgtgtacctgaggctagccttcaaatcctgttcttgcctcttcctccatggtgctaagatcataggtatacgccactatgccaggctaacactacacaatgcgtacacttaaaactgcagttaagatgacatttctgagctagatatagtgtgtctcagacctgtacccctagcacccagatggctgagccagagggattatcacaaattagaggttagtctgggctacatagtaagacctatctcaaaaaagcaaaacaaaatagaaaaaaaaaaaaaaaaacccagtcctcatagactttagagagactttagacaccagttccccctgcccacccctctgttgtttggggtctggctcttcatgtgagatcaggccccactggcgtgtgtggtgtacgtaagtgtatgtaagcctttgctttgtgtatctgccacagtctggttttgccattattgaagatctgcgtagtctctaatttttgatactagtttcaatctgcagtactcttcattcccatacggcttgaggaatgtgtggctgccttctcgtgggtataaacctaggtcagagaatatgctgtcctgcttgagagacgctgtccagcagctttgcacagtggctgtgcccggtccgttctgctgacattgtttatgcactgtagctgctccacgccctcaccagcactcatcttcttgcctcggcctcctgagtgctgggtttacaggcattgggtcatcttgcccagcaacgtagcacttattcatgtcactagacatgtgggtctgctctttggtgaagtacttctctgagtgtcttctgtttcttgtgccttaacttatgtttccttatcctggttattagtactgcgtcggatgtatttattgaaattgtcttctccctatccccaccatgtcctagtgtttgaaatcagtcttagggtcttgcatacaccaggcaagcaccatagctccatcccagcacgaacctgcatcctcttctgacacacattttcaaaagaaaaattaaatggtttgaaaatgactagaggtttagggagtctttaaatctgttgtgaatttgtcttctttagttatgaggtaataatcatagcatgaatgttatattctttgaaaattcgtatttggcacatttccatgtgtatgtgtgtgcgtgtgttcatgactgcattatttgtaatcgtaaaagcgaaagcaactcaatgtctgccctgaccagtatataaagcatgatgtatccgtacagtggaatattattcagcattagaaaggaacaaagtaatgtggttgtgatcacacaatcctgaatatactaaaaaccacttatgtttacactttacatggataaaacatatgaattatattttaatagcaatggaaaaatctcaagttttaaaaatgttattcaaaaagtatttgtgttggttaattgcagagcctcagcttgggaaggaccagtttcacaggcagcatagactgactgacttctctgagacctgtcagagtaaaattagaccatctcaaccctaaagtagttttaagtagaattttgatcgtgtccatggctaagagtccttcagttttaaaaatagtgttcctgctacatgccagtgctacagaaaatatgacccaccgccctccaagagataccagttgagcagtggggcatttgatgctgtagccatcgtaacaaaagaaatacccaagggatcccggagtacataaggattccacatacaagaggaggcagggaagggatctctgagggatctattaatggctaaaaggagatctctaaatgagagattggaggattctcagggccatgccatgccatgccatgccatgccatgcccagttaagacctgaagtaacatgactcatttaggaaatcgtgagaatctgaatggctcaagtcaaagaatacttgttgagaaaatggtaggaagtcctaaaagggatggaccagagtgaacagccttctcttttaagctaaatataactctaaaggccagtcatgaccttctcctccccctcctcccacactctcaagataggcttttatgtcctcagaagagcatcagagagaaggaagaatggtcctatagttctctgcttaaaaacagaatttatagtgaagctatcatgatgggatactccccaaaaagggtgaggtcaggggcgcgttccctccgttagtcactctcactcacagtggaacactgtcagaacctttggggctgggctagcacattcacccagtgcttgtctggtgtgcaagagtccttgggtttggtcctcagcacctccgaaaactgtgtacgccccagaggggtagatctagaaggatcgtgtagttcaaagtcattctcaagtacatagtgggtttagggcaggctgggctacataagatcctatcacaaaagaagtaaagaacctagggctctagccctaccacagcacagatcaatacgggagggagggagccagtcctcagatcccttctcactgcccagtttcttagactactttcaatactgactgggttagtttaggttctcctgtaagcaggtgccaaaatgggcttagaagagcaagaaatgtgttggggcagcacttgtgaaagattaaagggttaggagcaaaactacgcgtggttgagatgtgtaggaaggaagagaaagaacggaagcagtaaattcagaacgtcctggccagcccgccatgaccctcagtgcaaatattgtctctagaatagtctcggttacataaatgtgcccaaaccctaatgcacttcagggctgactaatagctgtacagtggaaggatgtctggggcaggaacaggcagcagacgcccaagggctgcagccagaaactatcagctagcaatctccttgcttagggtgtcactaaagggaaatctgagtgctgtacttacagggtaacactgagtgctgtacagccatggtaacgctgagtgctgtacatccatggtaacactgagtgctgtacagccatggtaacactgagtgctgtacagccatggtaactccgagtgctgtacatccatggtaactccgagtgctgtacagccatggtaactccgagtgctgtacagccatggtaactccgagtgctgtacagccatggtaacactgagtgctgtacagccatggtaacgctgagtgctgtacatccatggtaacactgagtgctgtacatccatggtaactccgagtgctgtacagccatggtaacactgagtgctgtacttccatggtaacactgagtgctgtacagccatggtaacactgagtgctgtacatccatggtaacactgagtgctgtacagccatggtaacactgagtgctgtacagccatggtaacactgagtgctgtacagccatggtaacactgagtgctgtacatccatggtaactccgagtgctgtacttctatggtaacactgagtgctgtacttccatggtaacactgagtgctgtacagccatggtaacactgagtgctgtacatccacggtaacactgagtgctgtacagccatggtaacactgagtgctgtacttccacggtaacactgagtgctgtacttccatggtaactccgagtgctgtacagccatggtaacactgagtgctgtacttccatggtaacactgagtgctgtacatccatggtaacactgagtgctgtacatccatggtaacactgagtgctgtacatccatggtaacactgagtgctgtacatccatggtaacactgagtgctgtacagccatggtaacactgagtgttgtacttctatggtaacactgagtgatgtacagccatggtaacactgagtgctgtacagccatggtaacactgagtgctgtacagccatggtaacactgagtgctgtacatccatggtaactccgagtgctgtacagccatggtaactccgagtgctgtacagccatggtaactccgagtgctgtacagccatggtaacactgagtgctgtacatccatggtaacactgagtgctgtacagccatggtaacactgagtgctgtacatccatggtaacactgagtgctgtacttctatggtaactctgagtgctgtacatccatggtaacactgagtgctgtacagccatggtaactccgagtgctgtacagccatggtaacactgagtgctgtacagccatggtaacactgagtgctgtacatccatggtaacactgagtgctgtacatccatggtagcgctgagtgctgtacttctatggtaatgctgagtgttgtacatccatggaaacgctaacacatctaagtacatgaatgtacatttagcttatagagaggaaagcattgctaggccaaatttatgtcagttttgctaatgcggatgggattgtttaatctgttttcttagagcatctaacctgttattatatgtctataagaaagatgttaatggtacaagatagccttttgagacaggatctcactctagcccaggctaaatctagaatttaacttaactagcccagactggccccggacacagcctcccaatgctaggattacaggcatgaaccaccatgactggcgatttttcttttctacttagctgctttactttggattccagctaaagagtttgttagttatttctcagttaaacatatcagtaagttagttttatctgcacatgactttgtcatttacaaaaatagtgcttttataatcgtgtgtgtgtgtgtgtgtgtgtgtgtgtgtgtattgctgttgtcgactagaagtgacctcagttcattaaaaggtgttgtaaaaagattactaaaaaacatcttttagtctaaccaaggaagaattgcatccatggataaaagatacaggtggaaggtgacagacgggaaatatgacagaacacagacttagccatgatgatgacttatcccagtaacctgagtgtgggcctcaggaggctgaggcagtaagacaaatcaagcaaaaagaagggagcagcctgtgtgtgctggccttgccttctgcttgtgtttagagcagaaatgtaagagattgaatcacgtcctgtcctgagtcagtgtagtgaagagtcaggggccctttctacacttctgctctgggcaccaagctgaatctgaggcaggttgttctctacactgccacatgctgtgcctacacctaccagtattaccaagtaaattgtagccagattccacattaactaattgttcgcatatttattacctgcctccgaatattgctcacagaatattatttttaaataactatttattatagaaaattaatttaataatttaaattaatcctataagccagggaaaaccacagtgattatgtcaacatttttttctttgttttcttgagtataaaatctgcagctgtttttgtgcattaaaaaaaaaaaaaaacagaatcattcttgacaagcttgacacctagacatttgtcctggtattaaatcttcactgcataacttttaaatattgcatcccactgcaaaactatatcttagtttatccagttttatttttaagaaatgcattttagatttgtcacccaagagccacgagtagcctttttctctctctgtgattccttttctagagggacttctctgagaccctcagatattagaagagagaaagattttggactcatagacagaccccggatgtaaacctcctggtggggtctcagccacagaacgcgctctccctcactccttcccctccaagtgttctgaccacacagactgctcaccgtgagggacctgattacgactcactttctactcagcattttcacattttgtttctgtcttttctcctagagataagagctcagtttccgcagctgatgggggtgcttactctggccttctttattcacaactgcatcatcacactcttgaaaaacaacaagaaccaagaaaataatgtgagtggctaactcggaagctgcctccgtatttcgtaagcgtagactttaatatgtgtttgaagcaccttatgttttgagtaaaattgtgatatttgttcccacatcttaattttttaagtttaaattgtagatcagtggtcaaacatatgaaaattttagatggtaagtattttaggctttgcaggctatgttcttgttacagctgcctaatcctgcttttgtagtatgaaaacagccacaggcaataaataagcaagtgggtaatatcaatgctccaaaaaaagccttatttgcaaaagcagagaacaggtcaaaaacttcaataataattataaaaaaatgaagatactaaagacaagaaaagaacaaaaaaatcggtatgaaaaagaaactaaatagcaagctaatagatttaaacattgaaaaattacactaaatataaatgccccaagcactgcaacaaaaaattgtcaaatttttttaaaataaaattaattatataatatctttaagaaacttttaatataaaaatatagccttggaatataagaaagtaggaagtctatgtaacttagcagcacaaatgataatgctggagtcaaagatgattatactgtgacccttatgaactgattggattggaagtaccatggtgatatacataaaatttacattggagaaaatgtcctataggaataagttcatcctatgtttgatttagatttggccatttactaatattataaaaaatattagttaacagtatatttactcttagttactgaaaatgtaatattacaaatgaaataccatctagttgatactgttagatcacaatgttctccatttgtgttccttcttttctcactttccatgttaagtctactagtttttataagcttgcttgtgaccacgtttgtaagcgagacatcgtgcattgcagaggaaatgctatgttttctacttactttgctttaatatcaggttatacagaaactatgcattgaaatacaatcattctcttggaagaaagaaagaaagagggggaagggagggaaagggagggggaggaaaggaaaggaaaaagtgaaagaaagaaagagagagagagagagagggaggtagagagaaagaaagggggaaagaaagatgaaatcaaatgtaataatactaaatctacattcactcagtgattggagtgggcagggcagggcaggcaaaagcccgtccacaaagcctgtgagcctgagctcagccctcgggagccatgcagtaagagagagaactgaccctggaaagctgtcttctgacctacacacagacacacacactcaggacgttcataatatgtaattaaaagttaaggtaaagccgggcatggtagcacacgcctttaatcccagcacttgagaggcagaggcaggcggatttctgggttcaagtctagcctggtctacagagtgagttccaggacagccagggctatacagagaaaccctgtctcggtggaccagtgtgtgtgtgtgtgtggggtggggggggtagaggaaaaaaaaaagttaagataaatgaagtaacaacaaagtgaaagtagacaagtacacaattataattggagttgtcttccctccccctaaatagcaggaagaacaaataaacaaaagattacaagtgtagaaagcatgaaaaataccatgaacccggcttgattgaatttataaaagtcttctcagtagcagaatgtatattctttccaaatacccagaaacacctaccaagacagggtacatgctaggtcacaaaacaagagtcagtagctgcaacggaaagctatgcccagtctgttctctagccataacaaagtaagaatacaaacgaataacagacatttggggatttacaaatatatgaaagttaaccaacattcccctatacaaccagcaagttaaagaaaaagtcacaagaaaaaaaatttttaaaccttgagggttactgaaaaatgacaattcagaatactaaaatctatgagattgtccctaaagctgtatttaaagggatatgtacagctataaatacctacattaaaaataaaattgtgaaatcaaaagcctggccttcctccacttccgagtgctaaataggaaaatcaggagtccagggtcatctgccactacatagcgagtctaagaccagcctgaaccatgggaaaccaagtgttccaaaacacgaaaagcagttgactaggaaagtcatttttttgttttgttttttatgagtgtcgttgttgttgttgttttagacaagtttttattgtgagtcttatctggcctggaactcactgtatagagcaggctgacttggaactcacaatgatctgcctcctgaatgctaggatttataaggagttaaagtgcaagcaattctcacattgcatgattccctacatgtacaaatttaattactgtgggtcaggttacatgggtctcaatacggttcagattttagttagcccaggctatgaactctgaaccttgactagaataatgctcactgctctcagttcacaaagcactgggtcagtaacacgtgctcagcatgattagtgacagctcatgtgctccgtaagaccaggctggggtgaaggaagtttagatcaaactactcttaggttttaaaaaagcagaacattctattgttcaatgcttttgattaattcacttatttgtttgttcatttattacagtgctgggtattgaacctagggccctgtgcatgtgggaaagtgctacatccccaggccctttgttggcatattttaaattacaatgctaatatttctttcatttccttctccatttgtagcaaatactaaaatttaatgtcccagcagaaattgtcaaagattacacaaccatcataattcctgtcactgtcacaggtgttcatagcttctggctgcacagtaactgctgcactgccaggtgcagcctgtcggggcttaactcttgctcccaaaagtctcaagtggaattgcttttctagaaggttggacctgtttgtttgggagggtaccatgcctcttcgtgggaagctgagaactggagagacacaggtgccttggttcactgccctcagggctaaagaggtctaccaggctagtggctgcagtggaggtcagtggagcacacctgctgagcaggtgtgaacagtccaggggctgcagtggaggtcagtggaacacctgctcagcatgtgtgaacagtccaggggctgcagtggaggtcagtggagctcctgctcggcacctgtgaacagtccaggggctgcagtggaggtcagtggagctcctgctcggcacctgtgaacagtccaggggctgcagtggaggtcagtggagcacctgctcggcacctgtgaacagtccaggggctgcagtggaggtcagtggagcacctgctcggcacctgtgaacagtccaggggctgcagtggaggtcagtggagcacctgctcggcacctgtgaacagtccaggggctgcagtggagcacagtacaaactagcctgctggacgcctgtgaacagtcaggggctgagtggaggtcagtggagcacctgctcggcacctgtgaacagtccaggggctgcagtggaggtcagtggagctcctgctcggcacctgtgaacagtccaggggctgcagtggaggtcagtggagcacctgctcggcacctgtgaacagtccaggggctgcagtggaggtcagtggagcacctgctcggcacgtgtgaggcatgaggttaagagacagcagcgcatacacagaacaaagtagaatgctggacgcatggctttttcagctgctgagttggtcagagagggctctgtgaaatagtatattaggtaactaacaaaannnnnnnnnnnnnnnnnnnntcccctacccacccactccccttttatggccctggcgttcccctgtactggggcatataaagtttgcgtgtccaatgggcctctctttccagtgatggccgactaggccatcttttgatgcatatgcagctagagtcaagagctccggggtactggttagttcataatgttgttccacctatagggttgcagatccctttagcttctttggtactttctctagctccttcattgggggccatgtgatccatccaatagccgactgtgagcatccacttctatgtttgctaggcccaggcatactctgacaagagacagctatatcagggtcctttcagcataatcttgctagtgtatgcaatggtgtcagcatttggaagctgattatgggatggatcctttttattgtcttaattaaaactgtagtatgaagtggtggtctaactttaaaagtctaaaaggtttttgttttgtttagtttagttttttgcaaccttattttgtgggtgcagtgttctatgtacatgtagaaatcagagaacagcttttgggatcagtttgctcctctgtcacgtgggtcctgggcactgacctcaggtcctgaggtgtgtgtgataaatgcctttacctgctgagccctggtttaactgtttttgtataaaccatttgtacttcttaaaatgttaattactactcagaaaactaacatttatgaagtactatgtgccaatatccttctgaccactctaaatgtatgcgaatatatagtgtcttgattataacaaaattggcttttatattggcattaatcaaactaagtggacactatatcgatttgcttaattatacttttaagagctttaagattatacttttcaagagttttccctaaataatgtgactaaaaaatgtccagttaatagtgtgatacaaaatgtccctgggattaaagtcagaaatcatgagagtcatgaaagcgtttgaaagtagaaagccaggccgttccctccagtgtccccatagctgggcctgaccccttcctccctggcactggtggagagcagtagagccctcagcagctacccaagcaggatggcctggatttccaagttcaacttcccttgctgacttttgtcactaaatgtaactttgtatatgtgtttcttaactgaatatcatttctatttcttaaagcatacttagccaggaaaacattagggggttgaaaaagaaattatcatcaaaacgcatagtctctgtggctatggattcctgtaggataggtgttgagtcagaccttaggcggagctttctgtttagtctggttgtttgcgtttatgtagctgtttctcggctttgacctttaaagtgatttgagataccttctatctcatttgctgttctttttttcttgtctgagtctgtagatacttggctacacatcagaagtttttatataaaagttcagggtagatctgtgtgattgtcatttttcatagtaagtgctttacggggtagtattttcactatgaacagtacatggaacaatgtttgacaagcagaagtgttcccaggtttgctgttgatctcactgtgaatctactcctctttggaattgacattctacttgtctgtagttccttggtcttccagtcattgcttacctatgaagcagaggggagcaccttactgtgcaggcctcttgacagtctaatatcaccacctctgtctctttaaacatactgtttgcttggagcctcctcccccccaacacactagtttgccagaagatagctctccctcccctcttccatcccaggggcttttaggaatctgtattttaggcctagtacagagatggaatgggtctcaaagaatagcaagcccccgatacgtgcatgctgcccgtgagcagcatgcttcctcaatcacgctgagcctcagctcgtttataatgaaagcatcatctctgctcgtcagtgtttcctcatgagaacagacacacaacttgtgagctgctcccagtgtgtgctgagcacatgaagcagcctggcctcacaggcattggcattttccttgtatctctcgtgatgcttacctgtgatattctttgttatttcttcttacctcttgttaattattaaatatggcttcaatacctggagactagtaaactcttcatcactgtagctaagtgcacagttggcaccagaaagaccttgtttggggattagaatattggcttttaccaaactactcactgtataaccaggagcaagttcttgtggcctctgtgcttagtttacctcatctgtaaaggaactggctgcagctgtgttgtaaggttttatggggatcaaatgaaatggcctgcgggggctcagcagagatgccggtagatatcttcttacctatattgagttacctataatgccactgttaccaggacatctccagcaagaccacagtgcccgtgggtgggtaaagggcatggagaagaaccactctggaaacagttgcaaggaacagcacccgctttattgcatgtgaacaaccacgtccatcatagaagtctatcgaccgtggcttaacagtcactccttagcacatgacctcagtctggccagtgaatgctcacgccaccagtgtggaagacacacattcaaggagacacagagagtggggactcggctctcaggctgccccaggcctcggccatctgactcctggggcgtggcgtcctatgcttcttagttagaagctcagtgtgccaggaaggctggccgaagctcacgcctgcattttctcctacaagttcctgctacggccagccttgccccaggtactggaagtatattataaaacagacagtctcgtctccagggtcttacactccaatggtatgcatctatttggagaaaagaagttgattaaagaactgttaagcttagctcttttttttaaatgtccagggatatctttccacttgagaacgtttttcaaaaatatgattatttcgggaataaagcaatgattcagcctttaagcgcgtgcgctacttttgcggagagcccaagttcagttcccagtacccacactgggcagttcacaacttcttgtaactcaagctccaaagaatccaagaccctccccttgactctatgggcacatgcgctcctatgcatatacactgacccacagacacaggcacgcgcgtacgttagttaaaaagtaacagtagtaactcatttaagtggattgtttttacaatgaaagctagtggcaacgagaacaagaattgctgtgtgtggccatgccctgagaagagagaagtgaaggagcactgttatgttgggaagcgcttagaatcacccttcacagctccccagatttcactaaggtgcttgttttccaggtcagactacagggattcgggtgggatataaatcaagattatcagtgaagtcctccctcctctccctggcacagctgcttttgcctttccagggtctgtctattgtctgtctgtcccagtacatgcgtgcatgctttacatatgcatgggcatgtggaagagcccaagactggagttgggaatcatttttgatagcgcttaccactctattgaggcagaatccctccatcaaatccagagcgcacagatgtggctaactagcctcgccaatcattttgactctttgggttggcattggtgtggattaatggaggtctgaactctggtcctcatggtgtgtaatgggcaccgtaactaccgagccatctccccagatccccaagtgtttgtggtttttttcctaaagaggctttattgggctaagacagctggttcagcttgtactgcttctcagaggacctgagttcaattcccagcacccacaaacacatatatacataaaaataacaaatctttttttcattttttttttaaaaggaggttgagccagttgagtagctggagactggaatgccttgaatgttgtcattgaagccagctactttttgatgtgaaaataggattccttgatgtgttttgctcatcccacacaagagtgagacacaaccgcaggggaattctcgcctgagctgggcactagagctgcttcttgaactaaggaggaaggccttggaagccagctcttgaacagtaagctctcacagagctttgagagacctggggccaatttacataagcctccagctcagaaggccgaggtgcttttttctgatgtgtccctggcctgtattgtcagaggcttctcacacgttgttgtttgttctcgaccagacttacggatctcaagcttataaaccctgctgctgcgtcagcccattttaagactcatccagaaaaatccaaaatgttccctagtgtcagatatccttgccatgccaccaaacttaaaaatcacatagaattgttttttcctaatctgtttccctagcttttgagttatttctatctaaaatgaataggcttgttgccacaattccttttgtgttgaattgtttggctgtaacttaagtggaggagacagtttgcaagctgtggaatctctctgcttggatccagcagctggctgccttcagtctcttggagctttttattttgcacgcctgggaggatgggagcagcagtagaagaaagctggctgctgggtttaacagtctgcatttgtttgctgattccggtaatagttttggacagctatttgaacagctgtttttcaaatgcccttttgtttcacatttaagtgtgtaatgctggtccttagtgctcacttgtctactctttaactagtgtttcttctttattaaatatcctttgatatgttccactcctgtggcctacgcatactttgatgataaaagctaacttgctaaaaaagcatttttaaaaatgtgcaggtcaaaccaaaagtggcttagactttcttgttgcctttttattatccttattcttttttaatttgacaaatgttaccttttaaaattaaattagaacttcggtcatgttaaaaccacagtttgtattagcttcccaagtcttctaacaagcagttcagtttagtctacattaaaattaaaaattagacagagtactttaatcagatttgtgtgtgtgtatgtgtgtgtgtgtgtgtgtgtgtgtgtttgactgagttctgtgaaaattagaacgtatacaaacacatacaaaataaaaggataaatttggatttccctgtcatcattgcttgagtagacttgctgtgacttctttgtattgagagaacattttattctgtgtttacattcaggtgagagacctatgcattgcttatatgctggtgacattgacttatctctatattggtatcctggtttttgcctcattcccttcgcctccattacccaaagattgtattgaacaggtaaggcactgtgtatgcccatgggatgttgtatatgtagcaggaagaacaatccaggagcaagaccaggcaggcctgggtttgaatatcacctcttccttccctatcccttccagggttctactttgtttttcctgaagtaacagagtacatgcatgctccgtttggtttttagatgaactttggagtaaggctctgcatactcggcagttgtaatgctcaaacaaccactctctctcagaaagagagaaagaaagaaagaaagaaagaaagaaagaaagaaagaaagaaagaaagaaagaaggaaggaaggaaggaaggaaggaaggaaggaaggaaggaaagaaaagaaaagatagatagagttctcttagaatagaccactgtttctgttgtgcacatggatttctaaaacctccaccgcgactccactgaggtctctggtttttctaaagcttagctgcagaaatgtcctgggtgaaccagttttaatacatcagtctttaagggacagtttagggactgcgtaacaaggactaaaacaaagacagactatttagatattaaaaagtgcaagccagaaccaggaagagagaaatccttcagcaaaaagttgtaatgaaacttagaaatagtaacactttcagtattcaagaatttcttgtgaaaatttcagcatttcatgggtgattttctggccagaggaaaccctgtcggagatcagcagtggtgttttaagacagttacaaggtgtaggtcagtggcattgacagtgttctccaaggaaacaggctgctgctgggtggtggctgcaactgttctctttgtggaagttctggggcagccaagcatttgcagaaaatttccccgattcctaagcccacagaaagctcctccccagggaataggagtatttgtggtgttctcaaagtgtaattctcaattaacctttttatatacccaactgaactgaagaaagcaagcctaagtataaagcatatccttcctgctagtgctacactgcaagggctgatggcacacacccaccatgcacagtgacagatgcacacccaccatgcacagtgacagatgcacacccaccatgcacagtgacagatgcacacccaccatgcacagatgacagatgcacacccaccatgcacagtgacagatgcacacccaccatgcacagtgacagatgcacacccaccatgcacagtgacagatgcacacccaccatgcacagtgacagatgcacacccaacatgcacagtgacagatgcacacccaccatgcacagtgacagatgcacacccaccatgcacagtgacagatgcacacccaccatgcacagtgacagatgcacacccaccatgcacaggtgacagatgcacacccaccatgcacagtgacagatgcacacccaccatgcacaggtgacagatgcacacccaccatgcacaggtgacagatgcacacccaccatgcacaggtgacagatgcacacccaccatgcacagtgacagatgcacacccaccatgcacagtgacagatgcacacccaccatgcacagtgacagatgcacacccaccatgcacagtgacagatgcacacccaccatgcacaggtgacagatgcacacccaccatgcacaggtgacagatgcacacccaccatgcataggtgacagatgcacactcaccatgcacaggtgacagatgcacacccaccatgcacagtgacagatgcacacccaccatgcacaggtgaccgatgcacacccaccatgcacagtgacagatgcacacccaccatgcacagtgacagatgcacacccaccatgcacagtgacagatgcacactcaccatgcacagtgacagatcacacccaccatgtacactctttgaaagtgctgctgtgtcaaaggaagaaaagccagagagctatagcaaagatacagtaccaacaaatttaatttgccatttaagtaaattaggaacagatttgtttattgtatttgaactttatatagctgtgttccttttgtgtttgttgtgaagaacaaagttttctttattattctaatgtagagtaattttcagactagaatgtttataaaatagaatatgccagtgtcaattttttaatcagtttctaaataatgtaattttggtttctttactcctctcttgacaaatagttcacaagcagtttgtagacaggcatcagttcataaaccactatttggggattatgtacaaaataagcagaagtttgtgaatctgaatgtcctggatgagttttgacatttcattgtctttctggattagaacttcttagacaacttccccagcagtgacatcctgtccttcattgcaaggatattcctgctgttccagatgatgactgtatatccgctcttaggctacttggctcgtgtccagctcttgggccatatcttcggtgacatttatcctaggtaagggttcttctctagaccagcaagatgtgccaagcaaccaatgactgtgcaacaggtctgtttaaagggtgactgatccttttgctatataaaaaaaattgcctaatgaaaatggttactaaggatacatcacagagtctgtttcccagaagagctttaaatagagaagccactcccttgcctaggacaatttgatgtccatttcttccgagagtcaattagctctgatgtctattatatatttatgtgaagatttaactgctgttaagagcaccttgctaagaagtttatagcacttagaacctaggttggtgtttgtgctaatataagccaatacttttaattattggatattaatacatatgtttattaatagctgtatagcttcatagaaatgctcagtatttagtgttgaaggtgaaacatagaatgagttggatttcttacataattaagacaagtttaacttgctatgggaattttagcttcttaatgagtgtggaggaattgtgcatccttttgaaaaagacctgttgaggtagttacccttatccaagagaaatgtccacagagcatctctgtgtttccagagttccccatgacaagcacacactgtcatttgccctacagttgcgtgtctcgcagacagtgcatgcttttttggactcaagacttatttatactggggcattttatagaagattaccaggagctttcatctacaaagacacatctatcaatatttaatgtaaaaaattaaaactgacaattttaagggatctgttgattcctttaaaaaaaataagtaggtccaaacacagaggcacacacctgtaatcccaccccaggagactcgcgcatgtgaggctgacttggaaaacaaacgcaacactcttgagaccctgacactcactcaaaaactatggtaaaacagtgacttgttaacatgaatagtatctttatgagaaataactagttccaaaaccaaatggcttgacagctataaacccttttaatgtctgcttttctggttgacagttgaactcttgtgtttctgcagtatctgttatattgttattttatttaaatatgtgaagaaaattcagtcctatgtagatgtataattggaaaagaagaagcaccttttttagccttgtcagataattgtaaatgtgcacctttggtgctgtgaggaaatgtgacgacaccgtgtagttcctctttccggttgtataatcagagccttggttgccttcagttcatccattgggcttccttgctctttgcctctctggtcctgagtaatttgtgacaccatgtttggttaatattgattcacagagttctgtaggtttctcagatgttcacacatttctttatacactactaaagctcacatccattaatatcaccaccgacttcatctttaaaaaaaatatctttaaattttggaaaactatcaaactcaaagttacaaatgccgggtttctgaaatcctagtttttatcgaaaactcaattgttactgtcagggacaaatactgtctgttgttgtcctcaaatgtgaagcgcatcaatattcacttaaagagaatgccggttcatcaccaagggttgatgcctgctgtttgggctgcattcaagggaagctagcatttgttgagaccatcagatagttcagtccagctacactgcacagctgcttttccttaagacacccaagtccttgggtgtgcagatgtgcctaattgcttccctatgtggacacacagaatagtaaaatgatatatactccaagtataagattcagtaaataaagctttgcaccttgcggcccatgggtactggaaatcaaacccaggccttgagcatattaggtaagtgtggtcccctgcctgagctgtatccccagccctctcacagacacagttaataaatattttttcttgttttgttttcttcttgaaagtgttgcaatgagaactccatcatagaatacagatgcctttacccttatgtgttgccttaaatcatatgatgtcttgcagtgttatgagaaccctatttacctcagagccctcctgagacagaattcatggtcacacttggagaaaaagccactactttggaaaattaacaaaagtttttcttttagtaaaaacaaccaaggtacagaaagttgaagactgaaattctgggtgaataataaaatcttgatacctactatctctgtcacttatcaagatatatgctaaccaactacagcataaaataattttccttaatttttcagacattgacaatattgtccccaatatcttcctacacttttttttctttaggttttcttgtttagtgaaaattcagctagcttctttccaaattgtttaagtagtttttggttatctacataaataatattatttttaataattgttttatgttttgtcaagtaacctgttgactatcttgtcctgaaattttcttatttttctataattaccttgcttaataggtttcttcatgattctgttttctcaagatattccaaataaaattatatagagagctgggcgtggtggtgcacgcctttaatcccagcacttgggaggcagaagcaggcggatttctgagttcgaggccagcatggtctacagagtgagttccaggacagccagggctatacagagaaaccctgtctcgaaaaaacaaaaaaaaaaaaaaaaaaaacaaaaaacaccaaaaaaacccaaaaaaattatatatagatgtgcactctggtgcatactactagtttccatttacaaaatttgcctttttatataattagataaaaaggccagtttcactgtctcattaccagcactgagtagtgaatttcagttttgctggcagattaaagaaaatcattttaaagaagaatgagttttattctcctgaaaattgattataacttacctgtttatatcttttctttcctataaactctcttctgttttctagcattttccatgtgctgattcttaacttagttattgtgggagctggagtgaccatggcctgtttctacccaaacataggagggatcataaggtacgcgtctgtgaatcatgctccagtatcatcgttgctgttgggtttttaattgaatgaattttctgtcagtatttaagactggtagtgttcaagtgtacaccctggtgtttgttacagtgctcactaaatttcattgttgttgatctctggtacagaagggactgtgggagcaattgttctgtctgtggagcctgtgggggagaatgttctgtggtgcctgtgaggaagagtgttctgtgatccctgtggggagagtgttctgtggagcctgtgggggagagtgttctgtctgtggagcctgtgggggagagtgttctgtggagcttgtgggggagagtattctgtggagcctgtgggggagagtgttctgtggtgcctgtggggaagagtgttatgtggagcctgtgggggagagtgttctgtgatcctgtgggggagagtgttctgtggagcctgtgggggagagtgttctgtggtgcctgtggggagagtgttctgtgttgcctgtggggagagtgttctgtggagcctgtggggagagtgttctgtctgtggagcctgtgggggagagtgttctgtggtgcctgttggggaagagtnnnnnnnnnnnnnnnnnnnnnnnnnnnnnnnnnnnnnnnnnnnnnnnnnnnnnnnnnnnnnnnnnnnnnnnnnnnnnnnnnnnnnnnnnnnnnnnnnnnnnnnnnnnnnnnnnnnnnnnnnnnnnnnnnnnnnnnnnnnnnnnnnnnnnnnnnnnnnnnnnnnnnnnnnnnnnnnnnnnnnnnnnnnnnnnnnnnnnnnnnnnnnnnnnnnnnnnnnnnnnnnnnnnnnnnnnnnnnnnnnnnnnnnnnnnnnnnnnnnnnnnnnnnnnnnnnnnnnnnnnnnnnnnnnnnnnnnnnnnnnnnnnnnnnnnnnnnnnnnnnnnnnnnnnnnnnnnnnnnnnnnnnnnnnnnnnnnnnnnnnnnnnnnnnnnnnnnnnnnnnnnnnnnnnnnnnnnnnnnnnnnnnnnnnnnnnnnnnnnnnnnnnnnnnnnnnnnnnnnnnnnnnnnnnnagagtgttttgtggtgcctgttggggaagagtgttctgtggtgcctgtggggagagtgttcagtggagcctgtgggggagagtgttctgtggtgcctgttggggaagagtgttctgtggtgcctgtggggagagtgttcagtggagcctgtgggggagagtgttttgtggtgcctgttggggaagagtgttctgtggtgcctgttggggaagagtgttctgtggtgcctgtggggagagtgttctgtggtgcctgttggggaagagtgttctgtggtgcctgtggggagagtgttctgtggagcctgtggggagagtgttctgtctgtggagcctgtgggggagagtgttctgtggtgcctgttggggacgagtgttctgtggtgcctgtggggagagtgttcagtggagcctgtgggggagagtgttctgtggtgcctgttggggaagagtgttctgtggtgcctgttggggaagagtgttctgtggtgcctgtggggagagtgttctgtggtgcctgttggggaagagtgttctgtggtgcctgtggggagagtgttctgtggagcctgtgggggagagtgttctgtggagcctgtggggagagtgttctgtggtgcctgtggggaagagtgttctgtggaacctgtcggggagagtgttctgtctgtgaagcctgtgggggagagtgttctgtggtgcctgtggaatataatgaactttaaagttcctattaaagtattccttgagaaaattgagaaaatggttctctgtcacaaactcatttaaggatttttgtcttccttaataattacactgaatgacacagacaaattcatcttttctcattcgtaaacaaatgctcacaaactctgaaagatttaataaaggtgaaaattttagtccagggatatagctcacctggtagagtgcttcaaccccagggctccatccccagcacctcctaaaccaatatagtgtttgaagtacccccacttaggaagcagaggcaggagaactggaagttcaagaacatcctcagctgtacatctagttcaaggccagcttggtctacacgagatcctttctccaaaaagatcctttctccaaaaagatcaagattaaagcctgtctcaggtgcttctaagatttaaggaatgactaaaaaactctttagcatgcaaggaagaaataataattttattaatttaaatgaaaccagttttaaactcatgtcagtaacaaatgacaattttgtttcaaaatgagacctagtacagtttaaatcatactgtatttacttaattataaagcatcagaaatgcagtaagactctataagcagaaagttttattttgcaggtattcgggagcagcatgcggcctggctttcgtgttcatatacccgtctctcatctatataatctcccttcaccaagaggagcgtctgacatggcctaagttggtgtttcacgttatcatcatcattttgggcctggcgaacctgattgctcagtttttcatgtgaaaactctcttctcaagatttctcgtggtattctgaaccttggcaacggttctgcataaaagaacttgaaaatgctgtcattgctgtaattctaagtgttcttctaagataattgaaagcgagggaaatgatggtctctcataagtatttttgtactcgtgctgggagggcgtaagtattaaggatggttcttctcagtgaccctcattcccatgtatccaagtagacatgtgggagggatcatactgatatttatgttaagttaggtgggtgtgtttcacccacagcaaggaatctcaggggtcttgggtcagggctgttgccagaccctgtgtgtgcttccatgtgggctcttccaccttcttacttgctgggccatttccccagtttgcccaaagctcaactgtctccaacagtaaaaccaaatacctcattttaaaagaagtttccatggcatcattattaatgggatgaattcctaactcaacacttaacctgaagaacaaaaaactttaaatagtgtcagtccgtcagaagctatgtgtcagctagggccagtgaggtggctggtgtgtccgggagcaccttgatggtaggctgagagggtctaggggttaaggtcatccccagtttgcctcttggggggatgggctgtttgttgggtttagggttttttgttttgttttttttccttgagaaagcctttctgtatgtatccctggctgtcctgaaacttgctcttaggaccagtctggttatggccagtttgaaaccagcctggtctatataaagccttgtatcaagacactaaaagagaagagagaaaaccaaaagaaattaggtgtcagatcaacttgtagagtccattgctatctgactcttaattcaaatccagccccaatggcttaggttgaggttacaattcccaagcctgaacaaaagcagttgtcctctattcttgcccttgagaactgcatggactgtcatgaagcccaatggaagaagcacaagtggagatgggcatgtgaggctcttcaaaagggaaaggaatctgcccagtgtgcccgagtcatcctggttcaggtgtggcctccaggagccaacaccctctacctgcttctagagcagaaagagaagagttaggtctcacaagaaaagcttctgacaagatgactgagaaatgcagattcttagacttaacactcttgccatcttccttctgaacaaaaagctaaaccagaatccagatctgtctatctcttgtgtaagaggatctgtggtctacccacaactacaagcatttaggtttctctaattttgactaaactcttttaaacgcatcataattccacttcccaggacagtgtcatgttctaaaaaaaaaaaaaaaaaaaaaagtaagatggttttgtgaatctcgtaagcagccgcagattcagaccagctttaatttcttctagtataactttacatcctagtagagcatgggtctatgtttataaggatctgtagtttctaacactttctaaagtctcattatgaaaaccgtcaagcaaatgcacaaatagaataatatggaaaactgctgtgcacccgccctgggtttagtaattgtagggttagctggattagcttcacctgcttcctcccgaggtttcttttctcccgacatctttaaaaaccagtctcagacgttatgtcatttcacttctacagaccttcatagtcagctaatagcccagactttgaacctagttacatttaccatggagctagtctccaaagctctggctcacagaaacgcccgtggccactgggctgcatgggagcccgtgctcgaggaactctggaacttcatgactgcacactcgccttccgttagagacgtctgagtcagagccaggtgatgtaagaaatgtccctgacttgttctcgctatgttcttagtagtttcttttgtctttgaggacttgagagacatttccactccttttttttttttttcttcccaaagacgttcttggatgctttaacaatcaagaataattggctgtggttttgcccatttcatagataaaaggtaaccaaccggcaaaggatgctaccctccagacgaaaaagtaatacggattcatgcttttgttgtcttaaggacactgaacaatttagacctcttcctgacgtcctgttggacaagccaaatgactttgtctccttccacttttgtccttgttttccccatgagcctcctttggccttgccacacagtcagagaactctgcgcacgagtgtgtgtcctggctcgtatgagaatggagggggtaggaacccatgtgcagccatcttaccctttctttctctctctgctctcatctctgaactttctcactccgccacattcaccttatcactctgctgctacagccggccttcagcctgagcttctttaacttaaacacacctgaggacactcaaaattaaaatgagctgtttagggagagatcttccttagaaagcctgtgagtgaacttgagttgtgctaatattaaagctagaaagggaaaaagtagaggtaagctttatacctgtgggcatggatggttgtgccaagtcattgccatcagcacactccagaaatgtgcttggaaggaggactacgtcattgcagcccctggaagaggctgttttaaagggaaatgcttcgtctacattaaatgtgtctcagaagtgcagttccactactcactgtagctgtgggctagtcctctgcttctacttgaaacttaccaaggaaatgtttgatgtgtgtttttaattatcactcccttaagtgttctgtttcaataactgaatagtcagcaatgcacatgcctctggaggagttaaaggcagcacgcatgtcctcgaggagcaccttgagagcagcatcgaatccttgggggtgggcggcgtggcagagggggaggggctgctcagaggcaagggactcgtttccatgtccccgctattcccccagaccgcactccccgtgctcgctattatgatatgtagtagagatatgttacatgtatttgcttctgtgggttttgcagatcccctctaaagcgcgttttgtgacattcagctgctccgggctgttcttctttcttcttgatgatccctgcagtattgatttcctgtggctcttggacagaaagcataattgcttaatgtgggaggtaattagtaatacactgggtgctgcagacatttataaagtttccaaatttttcatttaagtatgaatattcaaaatgtcaaatgtttacattcattgatgtcacggtgtttggttttgttttctttctgtttttgtgataaaatactctgaccaaaagcaagagtctactttgacttacactccagagagggagctataatgcccaggaaggcttggaaacaggctccaaagcagggctggccaatcacgttgcatctgcatctaggagatcaagagtacagtgtccagcttggtgagtctataaactcactgccagctccgcccccctgtgacgtacttcctccagtagcactgtttcctgagagctccagatcctccccaaaccagctgtggcgtgtgttcagccgcacactctgagttcctcactgaaacccccgaagttggtagcagcagggagtgttatgctgcacgttttcctgacatggtattgacgggttgctttttagaacttggtggtgatttggattttgtgtctcactcaacttcacaccagcttgaatgcccccaaacaaatccaagtcaggtgggcgtgtaacaagggcatgcgaccagtctgtgatgcaaagtgaactgacccggctggccccactcgaagtctggcaatcacttaaggttgtataaacagctctaatgggaacctcagcgtgcaaacagaattctctgagatgttatttgtctttttataggaaaaaaaaagagaaatcagaattattttgaagaaaaatatctctgggattttgctagtggactttggcgaggaaatattgcctcctaaccctggcgctggcagaagcagctgagtcccatcctttgcaggactgaatttcttaagtgactgtggctgtgtcccatgtcaggctgtcaggggccttcttgaatgtcctgatcttctggaaaggtatatgtcacgttaacggggacctaaggagcccatccccatcagccagtgtgtgctctccctctaagaacatttttcgtggctgtggcacgttagataagcgttgcccagtttctggccaaaagccctggaaaagtcataactttccagagccttcagcgctaataaagaacactaattttctggcttctttaagtaaaattactcttttccccaccgaatatcatttttcttcttgatttcccaactgttctgaaaaggtaaagtaagactgttttaaaagtttaagatgacacggtgtttatcacagactctgccttgcggttcccaagcagggatgagctgcgctgttctgacacctccccacccccactcagtccccatcagtccagtaatattcagtcatagcaggcctcaggatccgattgttggattaagtagtcgagattccacttaaatagaaagtattagatgctattctattatctaggattttcttacatactcctcccccaaagtaatgtcgggctagaggtgtagctgaggggtacagcatttgcctcagaagtatgaggtcccagatttaatccccagtattccctgggcggggggggggggggggggggtgaggaagagtcagttaggttccagattgatcattcagtacctaagaacctaccggatgcctgaccttgtgttaagcgcttagcactgtggtgaacaggcaaggtgtggccccggtggaggagcatcctttgtccacccttgtgacccagcaactgagtcaccttccttatgtgccacggagatgccaggctcctgcccacttggtgctctgtctccgacgagctgagtatggacgccaaatgtgctaagcgggacttcctggagggagttgtggttttcagtgtaaaacgcctccacgttccaggttaactgtggcatttaattatttgtataaatacaggacaggcttccaggtgaaccactacatcgttgcttttattctttctataataaagagatgtctaagataaatcatggcaaagaagacttataggaatatgtgttctcataccttctaatagagaactagcttttaagataaatatctttgaatacattatcactaagactctcttgcaggccctcccggctttgaacccattatgtagtcagcgatggccctgagctttgcatctctttccttcacctcccagagccaggagcacagggagggctccaccaggccctactggggacctttgcttagaaggacaggtccaggtttcatgctggctgccatctacacagtttggtgttacccctttaaggaaaaacacagactctggagcctccggtaggaagaagcgcatacagatgggaagctggattcggctgtgttagcttgaagagtagatcagccacaggccgtttgggacagccaggaagtgtaagaaaccggaggaagagtagtgggcaccaggcctgagtttctctgtgacctgagtttctctggacctacttttaccagacctgagcttttatttctggaaaggctagattacgtgccaatctagtaatggttaatttgggatccgaatagggtatctttctttttcaggttggagcattcgtgcctgggcatgagtcttacaagctattactggtttttttttttttaattatttgttttgttgtattgttttgagaaagagccttgattgtgtactcctgtctggcctcaaatttgtggtgctcgtcctgcctgtctccagagagctgggatggcaggtctgtgccaccacacctaggttttggttttttggtttttgttttgttttttttaattttttcagaaattactaatttgcaaatagtggtttcccccttatctgagggatgagaaacttacaggggcccttggtgaaggaaaacaacttctaaggcctcattttagtaaggtaacatctatttatgttctgtgtataccagtaaaaaaatgtttctattaaagatacacttcaaaggattacccactttacagaataaataggaaatgtatgtcattctttgaagagaggaaactaaaatttgattcaaataaataatcctactcgtcagtgccagacgtactcggagcccaggcagtgctggagacgtggactgatggtcctcgctttggaaactgaagagcatcgtttttcccagtactactagaactcagcttcgcctgagactgactgtgcctctcccggtgaaatccgtgccgccacagtggaaaagtgggcatgggctttgaaacagagaactgcaaattagaagacagctcaagaacaaacaaacggccacagcatgacccagatagatgtgagaaacacgttccgtgagcgcaggcaggtgtacaaaacacacaccatcccgtgcttctcttcaggtgacctgtcgggagcggcacgtgtgtaaaaccgggcagtggaaagcagttgtttctagggtgggcatggggcaaagtttacccataaataaccatgggagactgcctagagacgcaggaccaagggttgtaatattagttacacactggactgttacccaaggcctgatagctgggatgcggacacactcatctctttccgctttaataataactttacaaggacatagcaaatgccagaaaaaatatgtgtaaggtcaaaactaaatgcgtgaagtttgaaacctttgtttagacatatgcatgggaagggagcttggagcttaacaaatatgaacactcattacctctagctgtaccttctattgttgcgtttactcatatcatctaaaatgttgaaatgtgttgttttgtgaagtaaatgtaataaatgctttttctttaaaaaatatatatattttcttgttatcacttataacaatagatgcgtttcttttatagtagtagcaaaaaaatctgccaggcatggataatgcatgcctttgatcctaggatctctgacttggggccaacctggtctccatatcaagttccaggccaactaaagcttcatactgagaacttgtttccaaaacaaattctgggccagtgagattggctcagtgggtaaagacgctggccactaaacctgtaaacctgagtttgatctctggggtccaccatggtggaaggagaccactgactcttgaaagttggtctctgaactccacctacgtgctgtgttgcctgtgctacacacacacacacacacacacacacacatacacacacacacacagacacacacacacagacacacatacacacacacacacacacacacacacacgaaaattccataattgtgctttcacaggctttttgttgggggatggtttgggtggtgttttgttttgttttattttgtttttctaagagggagtgggaaggtctcactagaaaccagttttctaagaaatcattgtttattggttaataacaataaattgggcaatgtcattcatacccataatcccaccatttgaaagactgaggagggaggattgctatagaaggagaccctgtctcaaaacagtagtaatagtcaccgtcaaattctatagccacctttaataatggattaaacctttaacgcacgtttctggccttttcgtccagcctgcattgcagaacccttttagacagatctgtggactgcagggtagaacaactaacctagagaataaagtctaagttctttagcttgctatccaagtcctgcttttatgacagtttttatgcccacccaatttttctccagccttgcttctttacttcatctgcttttctgggtttgctctgggcctggggtgcccttttcctctgggcctttcatggtgtcgcttacaaatcctcttcttaactgattctcagatattctaacgttgcatttgatccaggcatttgtctccccagggcgcagctccttatacaaggtacttgcaatgggtctcaagtgaacccttgtcctccagggcctaaagggtagttaggggcaggcgtgtgactaatattacaggagtgagtgagtgcaccaaggttcacccacttatgcaagatcgtctgcttaaagtctactaagtagggctggagctatctcacctgctatgcacgggctctgtgcctgatcctctgcactgatttaaatgctaattatacatcaaagcttccaaaaaatatccagatgtgtttgagtctctggatatcattccgagttgacagaattaatcaatacacgcaaaacctaacaactcacaacagcaggaagcaatttttcacttgcccgttatctaggaatcccctaaaacatatgactgtccaggcccaatgccggaggggcacagcatctcctgggatggcagaaccagtgagagcctgtctcaagtgctaatggctgaagcaccccatgagccaacactgggatcagaataggatgcttgtctggataatcagccatggcaggaaatgacacccttgcaaaagcattagccaatccttgtccactgggtcaaccaccttccaggccttcgagtcatttcaaaaggaagcatccatccagtcaagcgcaggtgacagctggtttttcttcagacgccctgagcctctcctccctcctcctccctcctggaatctgttttgagtttcctctagattaccagaacagattctaccagttacagcattaaagaggaaagatagatgtatttatttatttaatttcatgtatgtgggtacactgtcgccgtcttcagacacagcagaagacaaaatcagatgcccattacagatggttgtgagccaccatgtagttgctgggaattgaactcaggacctctggaagaacagtcagtgctcttaatcactgagccactctccatcccaccattaaaaaggcaagaaaaaagctagagaattgagaagttcctctatctatcaggttagcatcttggcattcagaagggaaatgcattctaacatgattcctgtgtcgataccataacaattattttgttatttttatgtaccatgtacacaatacatacatttttatactatgtgtatgggagcttatgatttatactcatagcataagtatagggacacctacttgtgtggatcctatatggtaaattatttgctacatgtgtgctggcatgccgtatgtgtgtctagtgcctttggaggccagaagaaggcccgggacaggagttacagacaattatgagctgccatgtggatgctgggaattgaaccatggtagtctggaaggtcagcctgtgcttttaactagtgagccatcttttgccccattttgttattttatttattatttcccatgatttcggcatttgaagtgatttcttgtgtggcattttgtcatttcatcagcccccaactgttggatccccccccaagctttgctgctttgatgatttttttttaatcaaaaacgatcacatacatatctccatttgcataaaataaattctagaaagaattgatgagtccaagactgtatgtaggtattgaggattttgataagtatacctgaattgtcttcataacaattacactggttaggaactgaagatgtatctcacttagtagcacacttgcctagcacacacaaagttctaggtttgtcctgcagcatcgacgagacaggatagcacactcctgtaatgccaggactcaggggtaaaggtaggaaagtcacaagttcaaggtcggcctaagacaaattaaaatcttggtaagtaaataaaatatccaattaaaaaaaaaagcaaacatacccaagagacgtaaacagcaggaaataatcaaactcagggctgaaatcaaccaattagaagcaaagaatatacaaagaatcaacagtaccaaaagctgggtttttgagagaatcaatgataaattaattaactaattagtaaaatcttggtaagaaagaacaaggttaggggaggaaatgataccgatttactaatttatacatcagtatggggcacttccttctctgcatctttaaagtatttgctgaactgagtaaaatgttaccttcctgttctcagttgtacattgattacaaatgaggtggctcttttatttttcccatttactaatctttaaggtttccgttcattgttgtgcaagagccaaatttgagaatggccttgttcctctgaatcctgatccgaagccatgctgaagatgtagtgcgttgttattttaagtattttaaacacaatcctcttgcttcctgtgtttctggtgactttttgcctcttagtgggccgtgaagaatgctccatagttaatcagattctgcctgcagcagaaatcgtgttccttatcacgttagctcgagggaatcccctgagaacgaggctcaggtctggaggagcttctgcagggcgctgccctgaccgactgggctcagcacagcaccaggaagagctaagccaccttcaccacagcccccgactgtgggtcacccatctgtcctactctaaatagttttggctattagtttttccccagtatttacacttgatcaagcaaaaagggccactcagaaaatatttactgatcaaatgaatgaaacttctgattagaataaaaagttggttgtcaggaccaaggagaggactccgactgtgaagagatctacaaatatgaagactggaacttgagtccccagtgcggacacaaggagcacctgggatcccagtgctgagaggcagggacagcgagtccagggacttactgcccagctgggagctccaggcttagcaagcctttacaactaataaagcaataatgagcaataataaacaatgattttaaaataatagaagatactggatattgacctcgtgtctccacacacacaagcacaaatgttcatgtccacaatcaccacatacatacctcgggggacgggagggagagaggtaaaaatcaaattgcaagcaaataaaagaggattatgaatatatgtttctgtctcttagcaggacctatctttcagagctatagaggaaaggccacattggggggggcgggggtacctattcatttgattacatgaaaatattcaatattcaattctatggattaaagaaaaaaatagaaacgagggtcgggagtgtagtttaa

SEQ ID NO: 3496 - DNA, 3002 bp, Mus musculus
aaacgataccagcagcaaattcccatacctctctattttgtctgcatgcaaatatattaaaaatagtaaaatgtttttaagattaaacaaaattactttttttttctggttgctataggactggctgccccagtgcctggaatctgagggaaaatggcaaatgtggatggtgattccaggcatcttctctctgaggtggaacatgaagtaagccctgggcctatgaacatccagtttgattcatcagatctgagatctaaaaggcctttctatatagagcctaccaacattgtcaatgtgaatgatgtcattcagagggttagtgaccatgctgctgctatgaacaagcggattcattactacagccggctcaccactcctgcagacaaggcactgattgctccagaccatgtcgtccctgctccagaggaatgctatgtgtatagtccattgggctctgcctataaactcaagagttacactgaaggctatggtaaaaacaccagcttagttactatttttatgatttggaataccatgatgggaacatctatactaagtattccttggggcataaaacaggctggatttaccactgggatgtgtgtcatcgtgctgatgggccttctaacactttactgctgctatagagtggtgaagtcacggagtacgataatcgctcattggagcaatgatagtttattgggtgcttatgtctaattttctttttaatactggaaagtttatttttaattttattcatcacattaatgacacagacactgtactgagcaccaataatagcaaccctgtgatatgtccaaatgctggcagtggtggccgtcctgacaacagttccatgattttctacaacaacaacacagaagtgcagctgtttgagaagtggtgggacaagtccaggacagtgcccttctaccttatagggctcctcttgccgctgctcaacttcaagtctccttcattcttctccaaatttaatatcctgggaacggtgtctgtcctctatttgattttcgttgttaccctgaaggctgttcgcttaggattccatctggaatttcactggtttgtgccaacagaattttttgtaccagagataagagctcagtttccgcagctgatgggggtgcttactctggccttctttattcacaactgcatcatcacactcttgaaaaacaacaagaaccaagaaaataataacttcttagacaacttccccagcagtgacatcctgtccttcattgcaaggatattcctgctgttccagatgatgactgtatatccgctcttaggctacttggctcgtgtccagctcttgggccatatcttcggtgacatttatcctagcattttccatgtgctgattcttaacttagttattgtgggagctggagtgaccatggcctgtttctacccaaacataggagggatcataaggtattcgggagcagcatgcggcctggctttcgtgttcatatacccgtctctcatctatataatctcccttcaccaagaggagcgtctgacatggcctaagttggtgtttcacgttatcatcatcattttgggcctggcgaacctgattgctcagtttttcatgtgaaaactctcttctcaagatttctcgtggtattctgaaccttggcaacggttctgcataaaagaacttgaaaatgctgtcattgctgtaattctaagtgttcttctaagataattgaaagcgagggaaatgatggtctctcataagtatttttgtactcgtgctgggagggcgtaagtattaaggatggttcttctcagtgaccctcattcccatgtatccaagtagacatgtgggagggatcatactgatatttatgttaagttaggtgggtgtgtttcacccacagcaaggaatctcaggggtcttgggtcagggctgttgccagaccctgtgtgtgcttccatgtgggctcttccaccttcttacttgctgggccatttccccagtttgcccaaagctcaactgtctccaacagtaaaaccaaatacctcattttaaaagaagtttccatggcatcattattaatgggatgaattcctaactcaacacttaacctgaagaacaaaaaactttaaatagtgtcagtccgtcagaagctatgtgtcagctagggccagtgaggtggctggtgtgtccgggagcaccttgatggtaggctgagagggtctaggggttaaggtcatccccagtttgcctcttggggggatgggctgtttgttgggtttagggttttttgttttgttttttttccttgagaaagcctttctgtatgtatccctggctgtcctgaaacttgctcttaggaccagtctggttatggccagtttgaaaccagcctggtctatataaagccttgtatcaagacactaaaagagaagagagaaaaccaaaagaaattaggtgtcagatcaacttgtagagtccattgctatctgactcttaattcaaatccagccccaatggcttaggttgaggttacaattcccaagcctgaacaaaagcagttgtcctctattcttgcccttgagaactgcatggactgtcatgaagcccaatggaagaagcacaagtggagatgggcatgtgaggctcttcaaaagggaaaggaatctgcccagtgtgcccgagtcatcctggttcaggtgtggcctccaggagccaacaccctctacctgcttctagagcagaaagagaagagttaggtctcacaagaaaagcttctgacaagatgactgagaaatgcagattcttagacttaacactcttgccatcttccttctgaacaaaaagctaaaccagaatccagatctgtctatctcttgtgtaagaggatctgtggtctacccacaactacaagcatttaggtttctctaattttgactaaactcttttaaacgcatcataattccacttcccaggacagtgtcatgttcta

SEQ ID NO: 3497 - protein, 316 aa, Mus musculus
SLIGAMIVYWVLMSNFLFNTGKFIFNFIHHINDTDTVLSTNNSNPVICPNAGSGGRPDNSSMIFYNNNTEVQLFEKWWDKSRTVPFYLIGLLLPLLNFKSPSFFSKFNILGTVSVLYLIFVVTLKAVRLGFHLEFHWFVPTEFFVPEIRAQFPQLMGVLTLAFFIHNCIITLLKNNKNQENNNFLDNFPSSDILSFIARIFLLFQMMTVYPLLGYLARVQLLGHIFGDIYPSIFHVLILNLVIVGAGVTMACFYPNIGGIIRYSGAACGLAFVFIYPSLIYIISLHQEERLTWPKLVFHVIIIILGLANLIAQFFM

SEQ ID NO: 3498 - DNA, 3086 bp, Mus musculus
aaacgataccagcagcaaattcccatacctctctattttgtctgcatgcaaatatattaaaaatagtaaaatgtttttaagattaaacaaaattactttttttttctggttgctataggactggctgccccagtgcctggaatctgagggaaaatggcaaatgtggatggtgattccaggcatcttctctctgaggtggaacatgaagtaagccctgggcctatgaacatccagtttgattcatcagatctgagatctaaaaggcctttctatatagagcctaccaacattgtcaatgtgaatgatgtcattcagagggttagtgaccatgctgctgctatgaacaagcggattcattactacagccggctcaccactcctgcagacaaggcactgattgctccagaccatgtcgtccctgctccagaggaatgctatgtgtatagtccattgggctctgcctataaactcaagagttacactgaaggctatggtaaaaacaccagcttagttactatttttatgatttggaataccatgatgggaacatctatactaagtattccttggggcataaaacaggctggatttaccactgggatgtgtgtcatcgtgctgatgggccttctaacactttactgctgctatagagtggtgaagtcacggagtacgataatcgctcattggagcaatgatagtttattgggtgcttatgtctaattttctttttaatactggaaagtttatttttatgagtttcactggggttgctcacatcatttccaggaacatggtgagtttcactggggttgctcacatcatttccaggaacatggattttattcatcacattaatgacacagacactgtactgagcaccaataatagcaaccctgtgatatgtccaaatgctggcagtggtggccgtcctgacaacagttccatgattttctacaacaacaacacagaagtgcagctgtttgagaagtggtgggacaagtccaggacagtgcccttctaccttatagggctcctcttgccgctgctcaacttcaagtctccttcattcttctccaaatttaatatcctgggaacggtgtctgtcctctatttgattttcgttgttaccctgaaggctgttcgcttaggattccatctggaatttcactggtttgtgccaacagaattttttgtaccagagataagagctcagtttccgcagctgatgggggtgcttactctggccttctttattcacaactgcatcatcacactcttgaaaaacaacaagaaccaagaaaataataacttcttagacaacttccccagcagtgacatcctgtccttcattgcaaggatattcctgctgttccagatgatgactgtatatccgctcttaggctacttggctcgtgtccagctcttgggccatatcttcggtgacatttatcctagcattttccatgtgctgattcttaacttagttattgtgggagctggagtgaccatggcctgtttctacccaaacataggagggatcataaggtattcgggagcagcatgcggcctggctttcgtgttcatatacccgtctctcatctatataatctcccttcaccaagaggagcgtctgacatggcctaagttggtgtttcacgttatcatcatcattttgggcctggcgaacctgattgctcagtttttcatgtgaaaactctcttctcaagatttctcgtggtattctgaaccttggcaacggttctgcataaaagaacttgaaaatgctgtcattgctgtaattctaagtgttcttctaagataattgaaagcgagggaaatgatggtctctcataagtatttttgtactcgtgctgggagggcgtaagtattaaggatggttcttctcagtgaccctcattcccatgtatccaagtagacatgtgggagggatcatactgatatttatgttaagttaggtgggtgtgtttcacccacagcaaggaatctcaggggtcttgggtcagggctgttgccagaccctgtgtgtgcttccatgtgggctcttccaccttcttacttgctgggccatttccccagtttgcccaaagctcaactgtctccaacagtaaaaccaaatacctcattttaaaagaagtttccatggcatcattattaatgggatgaattcctaactcaacacttaacctgaagaacaaaaaactttaaatagtgtcagtccgtcagaagctatgtgtcagctagggccagtgaggtggctggtgtgtccgggagcaccttgatggtaggctgagagggtctaggggttaaggtcatccccagtttgcctcttggggggatgggctgtttgttgggtttagggttttttgttttgttttttttccttgagaaagcctttctgtatgtatccctggctgtcctgaaacttgctcttaggaccagtctggttatggccagtttgaaaccagcctggtctatataaagccttgtatcaagacactaaaagagaagagagaaaaccaaaagaaattaggtgtcagatcaacttgtagagtccattgctatctgactcttaattcaaatccagccccaatggcttaggttgaggttacaattcccaagcctgaacaaaagcagttgtcctctattcttgcccttgagaactgcatggactgtcatgaagcccaatggaagaagcacaagtggagatgggcatgtgaggctcttcaaaagggaaaggaatctgcccagtgtgcccgagtcatcctggttcaggtgtggcctccaggagccaacaccctctacctgcttctagagcagaaagagaagagttaggtctcacaagaaaagcttctgacaagatgactgagaaatgcagattcttagacttaacactcttgccatcttccttctgaacaaaaagctaaaccagaatccagatctgtctatctcttgtgtaagaggatctgtggtctacccacaactacaagcatttaggtttctctaattttgactaaactcttttaaacgcatcataattccacttcccaggacagtgtcatgttcta

SEQ ID NO: 3499 - protein, 344 aa, Mus musculus
SLIGAMIVYWVLMSNFLFNTGKFIFMSFTGVAHIISRNMVSFTGVAHIISRNMDFIHHINDTDTVLSTNNSNPVICPNAGSGGRPDNSSMIFYNNNTEVQLFEKWWDKSRTVPFYLIGLLLPLLNFKSPSFFSKFNILGTVSVLYLIFVVTLKAVRLGFHLEFHWFVPTEFFVPEIRAQFPQLMGVLTLAFFIHNCIITLLKNNKNQENNNFLDNFPSSDILSFIARIFLLFQMMTVYPLLGYLARVQLLGHIFGDIYPSIFHVLILNLVIVGAGVTMACFYPNIGGIIRYSGAACGLAFVFIYPSLIYIISLHQEERLTWPKLVFHVIIIILGLANLIAQFFM

SEQ ID NO: 3500 - DNA, 105496 bp, Homo sapiens
ttgtatctttatatatgtctggtttttagttctctgctaatatttcctactttttcatcattgtgatcttatttcccttcacatccttgacttagtttaatagctactttaaaatctctgtctactaattcaaacatctgggcatcttagaactggtctctctgttagttgtctttcctcttgaaaatggggtgtgtttggctgggcgtggtggcttacacctgtaatcccagcacttcgggaggcggaggcgggtggatcatctaaggtcaggagttcgagaccagcctggccaacatggtgaaaccccgtctgtactaaaactacaaaaattagctgggcatggtggcaggcgactgtaatcacagctcctcgggaggctgagacagcagaatcgcttgaacgcgggaggtggtggttgcagtgagtgagatggcgccactgcactctagcctgggcaacaaagagtgaaaatgtgtctcaaacaaaaaaaaaaagaaaagaaaatggggtgtgttttcctgtttttttctcatacgttgagtcactttgtattgtatcctagacattatgatttaaaaaaaatcttcaagtaaatttttattgctactaaaaatgacacagaaaaatgaaagcagaggattcaaatgaattaatattcatattaaatattatgattaattgccacatgatgcatatgatgcatgtgtactatatagtcaactgtctctagccatgcataaaataaaacataatacaatcccagcatttcctcttttattaagagcttagaatatgactgatcctttaatgtcattttttaagtatggtattttgtagaaactgtggattattttatgttccctcaaaaaaacattgattttctttgttttaggagtcacttcacttatttggactcaaactgcaaactctgtctcatgggtggcaactcaaaaagcagtttgggtctttaatttttaactggactacttagaatttattctacatgcatgatttagtggtcagtgaaagattgggtagagtttatgcataaaatttggggttctaccctcttttttacttatggtattcccccttactttccagaagctgatcgtctcaaattctgtcctctagttttttagactagaaaagcggtgatctaccagatttccagccacttctcatgatgcagactggagcctactcgcatgctggaatctgcaaaaacaggggaaactcacctagtgctgttcccttgtttcaaatgttatctaccctcctgcttttgcttactctttagtgccacagatggcatttattgtattttgtgcagaggtcaagaatttagttacaagagaaggttcgtgtgtttggagcttatgcagctcttacaagaaaaaactccactcaaacatttggtatgaggtttaaatttttgtagaacaattgaatgagaattgagggttgtagtgtgcaagagctgtagattccagattagagaatttagaagaatttggatcaatcctagttgtttccgacactgtaagtctttgccaatctatttttgattcaattacatgcttttggtagtttatccggactcttcccaatcaactctcattttttcatcacataccagtcaattttctaagaatctgtccatttcttctagctcattgaatttgttaacatataattgttcatagtattctctcataatcctttttatttctgtaagtttggtagtaataaccacactttcacttctcttttagtaattttcttctttttttcttaccagtctagctaaaggtttgttgatgttgttgatcttttggaagaaccaactattggttttgtagattctctctattgttttctattctctattcctttttttttttttttaagagagacagggtctcgctctgtcacccaggttagaatgcagtgacacaatcatacagcttactgcatccttgaactcctacgttcaagcaatcctcccatctcagccgcccaagggacggacttcaggtgcatgccaccacacccagctatttctctatttttttgtagagacaggatctcaccatgttggacaggcttattttttaaaaaaaatcaattatcttgtctaaaatcctaattatttcctttctcctgctagctttgggtttactttgcccttatttttcaagttccttaaggtggaaagtttgattattgatttgagatctttccttttcttttttttttcttttttttttttttgagacaaagtcccactctgtcatccaggctggagtgcagtggtgcaagcttggctcactgcaacctccatctcccaggctcaagagatcctcctgcctcagcctcctaagtagcaaggattacaggcaggcaccaccatgcccagctaatttttgtatttttagtagagacagggtttcaccacattacccaggctgatctcgaactcctgggctcaaacagtcctcccacctcagcctcctaaagtgttgggattacaggcatgagccactgcaccctgttcaataagttttaaaagactaaaatcctacaaaatatttttggatttttcatctctaaaaaaatacaaaaactaggtgggcatggtggtgtacacctgtggtcccagttactggggaagctgaagtgggggggcgtatcacttgagcctgagagtttgaggctgcagtaggccataagcatgccactgcactccagcctgagtgacacagtgagaccctgtctcaagaaaaacaagaaaaaaaacaaagaaacgaaaaacaaattattgagacttgttttgtagcctaacgtatagtctatcctggtaaatgttccatatgcacttgagaaaaacatacactgtattagtcctttttcatgctgctgataaagatatacccatgactgggcaatatacaaaagaaagaggtctaattggacttacagttccacatggctgcagaggcctcacaatcccagcagaaggcaaggaggagcaagtcacatcttacatggatggcggcaggcaaagaaagaatgagacagaagcaaaagtggaaaccctttataaaaccatcagatcttggggtcaggcacaatggctcatgcctataatcccagcactttgggaggctgaggtgggaggatcacctgaggtcaggagtttgagaccagcctgaccaacatggagaaaccctgtctctactaaaaatacaaaattagccgggcatggtggcgcatgcctgtaatcccagctattcaggaagctgaggcaagagaatcacttgaacctgggaggcagaggttgcagtgagccgagattgtaccattgcactccagcctgggcaacaagagcgaaactctgtctcaaaaaaaaaaaatcaaaacaaaaaaaccatcagatctcatgagacttactcactgccacaagaacagtatggggaagaccacccccatgattcaattatctcacaccacgtccctcccacaacgtgtgagaattatgggagtacaactcaagatgagatttaggtagggacatagccaaaccatatcattatgtccctggcccctgccaaatctcatgtcctcatatttcaaaaccagtaatgccttcccaacagtctcccaaagtcttaactcactttagcattaactcaaaagtccatagtccaaagtctcatctgaggctgggtgcagtggctcacacctgtaatcccagaactttggaaggccaaggtgggggcatcacctgaggtccggaattcaagaccagcctgaacaacatggtgaaaccccatctctactaaaaatacacaaattagccaggtgtggtggtgggtgcctatattcctagctactcaggaagctgaggcaggagaatcacttgagaccaggaggtggcggttgcagcagtgagctgagatcatgccactgcactccagcctgggtgacagagtgagacactgtcttaaaaaaaataaaagtctcatctgcgacaagcaagtcccttccacctatgagcctgtaaaatcaaaagcaagttagttacttcctacatacaatgggagtacaagcattgggtaaatacagccgttccaaatggaagaaattggccaaaactaaggggctgcaggccccatgcaagtccaaaatccagtggggaagtcaaattttaaaggtccaaaattatctcctttgactccatgtctcacgtctaggtcacgctgatgcaagaggtaggttcccatagtcttgggcagctccacccctgtggcttttcagggtacagccttcctcctggctgctttcatgggctggcattgagtgtctgtggctttttcaggcacatggtgcaagctgtcagtggatctactattctggggtctggaagacggtagctctcttctcacagctccactaggcagtgccccagtagggagtgtctgtgggggctcccaccctacatttcccttccacactgccttggcagaggttctccatgagcacccccacccctgcagaaaacttttgcctgggcatccaagcgtttccatacatcctctgaaatctaggcagaggttcccaaacctcaatgcttgacatctgtgtacccgcaggctcaataccatgtggaagctgccaaggcttggggcttccaccctctgaagccacagcctgagctgtaccttgaccccttttagccatggctctggaaggagtggctgggatgcagggcaccaagtccctatactgcacacagcacggggaccctgggcccagcccataaaaccattttctccaaggccttgggcctgtgatgggaagggctgccatgaaggcctctgacatgccctggatacattttccccattgtcttggggattaacattctgctccttgttacttatgcaaatttctgcagccggtttgaatttctcctcagaaaacgggattttattttccattgcattgtcaggctacaaattttccaaacttttatgctctgcttcccttataaaactgaatgcttttaacagcacccaagtcacctcttgaatgctttgctgcttagaaatttctcctgccagataccctaaatcatctctctcaagttcaaagttccacaaatctctagggcagggtcaaaatgccaccagtctctttgttaaaacataacaaaagtcacctttactccagttcccaacaagttcctcatctccatctgagaccacctcagcctggaccttatgtccacatcactatcaggcgtttggtcaaagccattcaacaagtctctaggaagttccaaactttcccacattttcatgtcttcttctgagccctccaaactattccaacctctgcctgttacccagttccaaagtcgcttccacattttcaggtatcttttcagcagcatcccactgtactggtgccaatttactgtattagtccattttcccgctgctgataaagacatatctgtgactggggaatttacaaaagaaagaggtttaattggacttacagttccacatggctggggaggcctcataatcatggcagaaggcaaggaggagcaagtctcatctcacatggatggtggcaggcaaagagataacgagagagaagcgaaagcagaaaccccttataaaaccatcagatctcatgagacttactaccacaagaacagtatggggaaaactgcccccatgattcagttatctcccaccaggtccctcccaaaacatgtgggaactataagaagtacaattcaagatgaggtatgggtggggacacacagccaaaccatatcatacactttgctgttcttgggagggagtgatgtcctataaatgtctgttagatctagttggtttatgtgttgttcaagtcttcaacttttttgttgatcttctatctgggcctttatggaatgcaaggtgttgaattctccaactattagggtagcactgtctaaaattacatctttacatattatgtgctcattaacatagatttataattattcttttatgcatttattttttaaatcctttttccttaaaaaagaggagttacaaatccaaaaatagaaaactacttacttttaatttcacctatgtagttacctttactgatattctttagttcttcatatggctttgagctactctctcctagcctcttttcaggctgaaggacttcctttagtattccttgtagttatgaactccttccgttttgttgttctaggaacatatttatttctccttcattttttaaggatacttttgccagattcaggattcttttttggcttttattcgcagcacttacgtcattccactgctttctgagctccatggtttctgatgataagcctactgttaatcttaatgaagattccttatacatgaccagtcatttctctcttgctgttgtcaaaattctctgtttttgtcttttaacaatttaatcacaatttgtcttggtgtcgatccctttcaatttatccgccctgaagttcattgagcttcttagatgtgtagacgcctgtctttcattaaatttggtaatttttcagctattatttcttcaaatattctttacactcctttattttctcctctccttttggaattcccactgtgcaaatgtttgtttgatagtgtcccacaatccttacaggtcttgttcatttttcttattttttctttctgttcctcaaactgtatactcttgatgtatcttcaaattccccaatctttcttctgcctgctcaaatctgctattgaacccctccagtgaacattatatttcaattattgtgcttttcaactccagcaactctatttgctttctttttataatttctacctctttaatagtatcctctatttattgaacaattcacttttcctggtttcctttagttattgtctattattttctttgttctttgagcatattgaagacagttgacaatgtctgggcttcccaaaggaatgttctttaaaaatgttttccttataaataagccatactttttttctttgcatgcctcataattttttcttgttgacaactggacattttgtatataatatggtaattatggacatctgcttctcccactccccaccagagtttgttgttgtttatttcttttattaaatgtctcaaaccaaaaaataaaaagataaaagcccaaaatgcgagaaaacactcccagtctttgccagttagctatgtgttctggcaccccttcaatgcttaacgaggtagtttacaacgccaccttagccttcacttcctgcttgcatgaaagctgacggtcagtcagaggtgagagtttacggtgttcttaggtttttctctgagtatgcatccagaccagggcatgccgatggccttctagattccccagaataaaatgaagctttccaaagcctttattcccccaactatctccttctccagcctcttccttcccaggatttttggtctgtttattgcttgtcctggctttcataccttgctttctgtgacactggctgtttgcctttaatgtttttgacaaacactgcctgggaagctgcctgagccctgaggaagctctgaggcaggtgaaacaaaggcaagccgttgagttgaaccttcaggaaaccatcagggaggtcaaaacacacctacaattccttgaggataaggtccatagtgctccctctggtgccagcaacccacaccaggaatgtggctgccatcttcaaggccactgacaacttggagaatagaagatgaccacagaactctcttaccaaaattcagcagttttttcttcattacatgttcccctggattttgtgagttttttttatcagtttcagagtttccaaaaaaggtgctcctgacagttttgccagcttattcatttttgagttccctacttttttcccattttttgctgacatcatttcatactatttacttttgtgtttcccagccttgcttgaaattattttctcagcctggaatgcagaaaaaaaagaaaggttgctatcactgaaactatcaaaagaatgtattactgacttgtgttacttgaccagccctgacttgaaggcagggccaatgaacagttaaaaaagtttttgaacaagaataccatcagcaaaacaacttttacctcccttaaagacaacattcattaaatcgtttgccttgcatttgtcaagccctccataatagacgcaatgtttgagagcacgcaggctttgggataagatcttagtatgaattccagatcttctgccacttagtagttgtttagccttgtacaaggcacttaaattctctgggactatttccttttctgtaagacaggaaaaatatacatttctagagctgtgataaagacttaaagagatattatcatttccagaactgtggtaaagacttaaaaagatatacacgtaaaattcttggcattcaatgttagctatttgttaaatttgaatttttattttattttattttagagactgagtctcgctctgtcgcccatgctggagtgcagtggcacaatcttagctcattgcaacctccgcctaccggattcaagcgattctcctgcctcagcctccagagtagctgggattacaggtgcacaccaccacgcctggctaatttttgtatttttagcagagacgggtttcaccatgttggtcaggctggtctcaaactcctgaccttgtgatctgccctcctcagcctcccaaagtgctgcaattacaggtgtgagccatcgcacccagcctaaatttgaattttcaagtttaggttttttgttttgtttcgttttgtttttgagacagggtcttgctctgtcacccaggctgcagtgcagtggcaccatcatagctcactgcagccttaactcctggcctcaaatgatcctcctgcctcagcatcccaagtaagcttgactacaggcaggtgccaccctgcccagttaattttttaaattcttttgtagaaatggggtctccctatgttgcccagactggtctccaactcctggcctcaagtgattctcccacctcagcctctcaaaatggtgagattacaggcataagccacggagccggtctaaatttttagttttttttctggcattacagacactgtttcttctggtttaaacagaaaaaagaaaaagaaacaaaaagagccactggcttcctttgtaagaagagcttagggtggccatatgcttttcagggactgaccttgaactgattttcataacaagcacattaattttacttagactgtatgtttacttggggaggttttggggaaaattgctgggtatgtggggtgggcctctaaaatccttctaaagccccttttagcctagagactaatttgcaaacacatttttaaaaaacaaacccaaatatctagacgacggagggagcatgccaactcaacagttttttcaaaccagcttccctttgtgtctgtagggtccaaggacgtaaccagatcatacaacacgcgccaggaaagcccaaaagaggggtgatccctcgatggaggtgccgcatcagcgttttctcacgtggcctccggggctctatgaatggcaagagattgcattccttctactacccctcccagcctccagccgggacaaggaactggagcaaactcggggctgcagttccgactggactcgcccacctgggcgcgccggctgcccagcctcctgaagcctcggggctgggccctgcggtgatgggcgtgctggccgtcgcagagccctctgggagttgtagtccgtagcggcgagaggtttgacagcgaccgcgggcttggcgcattcagaactccaactcccgccggcccctgcgacccaggctattgccgcttcctgtttggactaggagccccgcggtcgcaaattgcgagaatttgggaagggaatctttatcttctcgtctagttctccgaggttgaaggctcggcctgctcaggtagatcacgttcccacgtctagcaaactcgcccctcggggaggtgggaaggtatccgagggaaggcggcgggaagggttgaagttggggcgaagccggctgtcacctgggatagttctttgcagcgcatcggaaccgtctcttcttttggggctcagggaggccatagcctggagccgcggagactgctccggaggcacggcgcgcgctcctcaagggctcagggaaagaaagtcaggagtccctcggggtctgaggaaatccgagtgtctatgggagtcggtgtcagctggagccttagagaaaagatagggttggggtaaatgaacaccctgaccctcgggtgagagaaggagggagtaggagaattgtgggacttgcaggaatgggagcacccttctttctctctcttgagatagggtcttgctccgtcgcttgggcttgagtgaggtggcgcgatcacggctgggagcacctttctccatcccgagttggggacatctagagggggaacatgagggaggaaccccctttgggccttgagctaggaccacagagggggtgagggccatgactggtaagccctcgccacgcttttcacacgactcagttgtgagagtgagtgtgttgatagtgggtagcttgacatctcagcatagtaaagctggaagaggggtttgagagcagctagtcaagcgcattctcctcattttacagagaaggaaactgaggtccaccgagttggagaaacctactcaacaccaggtaaccatttaatggcaaactcgaccaacacctaattgtcatgactcccaggcagtgtcttatccattgccgtgctctgtagatgagcacactataagttgtaagttgtacctccaccttgttttcttttttcttttcttttctttctttttttttttcagacaagagtctcgctctgtcgcccaggctggagtgcagtggagtgatctcggctcactgcaacctccgcctccctggttcaagcgattctcgtgcctcaccctcctgagtagctaggattacagctgcccgccaccacgccccgctaatttttgtatttttagtagaaacggggtttcaccatgttggccaggctggtcttgaactcctgatctcaagtgatccgcctgccttggcctcccaaagtgctgggattacaggcgtgggccactgcgcccagcctcttttttctttttaataccttcagacatgacaaagatctgacatatgtaggataggcagctgctgaggagaaagattttttaaaaacgttttggccaggtgccgtggctcacgcctgtaatcccagcactttgggaggctgaggcaggcagatcacgaggtcaagagatcaagactatcctggccaatatggtgaaaccccgtctctactaaaaaaaaataccaaaattagccaggtgtggtggcacatgcctgcagtcccagctactcaggaggctgaggcaggagaatcgcttgaacccaggaggcggaggttgcagtgagctgagatcgtgccaccgcactccagcctggtgacagagtgaggctccgtctcaaaaaaaacaaaaacaaaaactaaacaaaaaaagtttcaataggtcaaaattacccatgtcctaacttgagaaaaatctctctgcctcataaacaactacaaacttcgtgttaagatagaaggttcggcggattgcggtggctaacgcctgtaatcccaacacttttgggaggctgaggtgggcggatcatttgaggttaggagttcaagaccagcctggcgaacatggtgaaaccctgtctctactaaaaatacaaaaatcagccaggtgtggtggtatgcgtctcatctgtaatcccagctacttgggatgctgaggcaggagaattgcttgagcccggcaggcggaggttgcagtgagccaagactgcaccactgcactccagcctgagccacagagggagatcctgtcttaaaaaaaaaaaaaaaaagttgtcacctatatagttgctttgtttctaagaaaataaaatttacctttccttcccctagacttctgagaacagttagacttagattccttttcttttctttttcttttttttttcttttttttttttttttttgagatggagtcttgctctgttgccaggctggagtgcagtggcgcaatctcagctcactgcaacccctgcctcccgggttcaagcgattcccctgccttagcctcccaagtagctgggactacaggcacacgccaccatacccggctaattttttgtgtgtgttttggtagagatggggtttcaccatgttggccaggatggtcttgatctcctgacctcttgatctgcctgcctcggcctcccaaagtgctgggattacaggcgtgtgccacacacgcccagccagttagccttagatttctaatcacaatcttaaatactatatatttcagttacatacataaaataatatgcttttaattgtgattttataatactctaaatacttacaataaagggtaaactcagcataggaggatggaataccaacctgaactacaaattgaaatagtattgtttagtattttttttttctttttggggttagaggcagagttttgctctgatactcaagctttagtgcagtggcactgtcatagctaactgttaccttgaactcctaggttcaagcaatcctcttgcttcagcctcccaaagcattgggattacaggcatgagccaccacactggacctatatggtattttttaaaaagtatatatgggcttaaaagttaaaaaaaaaaaatcacttagaggttaaaaatgtctgccaggcctgcattttgtaacatacttaaatttctgtcgtttgctagggtttttttctttcttaccactgaaatataacttgagagcatttagtgttcccattgtagaaggagagattctttggtaccacagcgttgctttggtaatttttttgtgagaccacactatcctccagcactgtcaaatttaacgccttttgaagcatttattgatcaggttggaagcatgttccaactgtcacatcagaataggagcattatagatcctattggctaaccagtaaatgattcatcaggaagagatttagataagtttgttattggagtttatagctgttacagactaatacagaagaaaatatatatacatagcataactgcttccaccagggtgacttttttgtggtgtggttccatttgcttttatgttggcatactacagaggtgagtaaactatgaccaaatttggcctgctgacagatatatttttttcataaagttctattggaacacagccatgcacactcaattgcctttcatgctaacaggtagaattgagtagctgcagaaactatatggctcaaaaagcctgaaatatttattatctgaccctttacagaaaaaaatatgtcaacctctagcctaggacactgagtataaatgtagtatctgaaactctataacatacacaaaagtattcagtaatattcatttttagtctctgagaaagaacatatataatagttgtatgtgggtccatagtcacatttatttgggcacaagctagtgtattctattgcagattgatgctagcatcttggcatagattctatagatttatttttgcaaagaattgtgaaaagacatttctgagcctagtatggaaagggctgatattctttgagatacgccaataatcacagtcaatacctttttaaaataatgtcataccagtttactttgattgctctctatgtcctttttacggagagaagtgcttcagtacaggcactaacattttttgttcttttagagacagtctcactctgtcacctgggctggaatgcagtggtgccattgtagctcgctgcaatctcgaactcctgggctcaagcagttctctcacctcagcctcccgagtagctgagattacaggcatgagccaccatgcctggctcagtcaccaacattttaaataaaagtcgaaagtaccaagcaagtcaactaagctgttcattccctactgggacctatctcagtctcttggtgctgctctaatgaaatacttgaggctaggtaatttataaacaatagaaattaatttctagcagttgtggaggctgggaagtccaagatcaagccacctgcagatttgatgtttggtgaggacccggtctctgcttccaagatggtgccttggtgctgtgtcctcacatgggggaagggatggaaagacaaaagggatctagctagttcccttcaaacttttcataaggttactaactccattcataagggttctgccttcctgacataattacctccaaaagggtctacctgttaatactataacattggcaattaagtttcaacatatgaattttggacgggacacaaacattcaaatcatagctggactccttattaaaaccaatcttaaacaattagagactcatttaatgacttagatttgacttagtggtcttgcatctgggactttgttttaaaactcagagattgagtgagatgttaaaagtgattatgtctgggttttgttttgagacagagtcttgctctgcaacctctgcctcctgggttcaagcaattctcctgcctcagcctcccgggtagctgggactacacgtgtgtgccaccactgctggctaatttttgtacttttagtagagacagggtttcactatgttggccaggctggaatatgtctgtttatgtcatcttgtatatttagcccctaccaaattatatcaatgtaatgtctgacaaattaatactatagaagtatttagcatttttgttaatcattgataaactattctgcattatcacctatgtaatatttgctgtggaactctaattcacctctcaacctaagtcatcaaacttcgggatattttatacttctcatcaagacattcaaaaaagctttaagactaggcatggtggctcatgcctataatcccagcactttggtactttgggaggctgaggcaagaagattacttgaggccaggctgggcaacatagtggcgcacagctgggatcccagctattttagaggctgaggtgggaggatagcttgagcctggcgggaggaggttgcagcaagcccagatggcactactgcactccagcctgggtgacagagtgagaccctgtctcaaaaaaaaaaaaagaaagcatatctgttgtcacctgaaattctcaggagcaacgagtacagttgtttctgttgtgacaaaacttgcaccatctacacaaaaaaataaaaattaaaaaatttaaataaaaaaattccaccttggctctgtgtggggaaaaaaggaggggacattaaatttctgttgaaaatttaacatcatgctaattgactaattgagacaactgcaaattaccagttttcttacagttcttcatatttacttgaatattataaatctttgaaaggcaccagggactttgaactcctcatttatgatttgttatttgaaatcatcagttttctacttatttagaataaatagctaattctgctatgctgcagaactttggatttgctcagaacaaatacacataggtgactaaactggaaattttaattcctcagtggcccttacatttttccccaaccttgatttcactttttgataaggttcactgaaatccaaggatctttctagatttctcctctttcctggtttcttcactttcaatctttaagtaaagtattaatttccagaaagtgaaaggatcttctctctctaaactcacccacattctcagtttagtttaggaaccaatactacagagtatattggtttacaaagtaaattagaaagtatagccatatatttctgccattgtttaggcagatatgtttttgctactctgacttggcttctgtcctttcccttgtttcactgccactggaagggttgttgctggctaaggaaatattgagccttgagacaaaaaattttgcaacaaaagaaatttacctaaactagcttgcttcaagaaaaacagattcatggtgtttaatgtgtaatccggatacccaggcatgaaatttcactcattctagccctgattatgtcttaaagagtttaaagccagccaggcacggtggctcctgcctgtaatcccagcactttgggaggccgaggcaggcagatcacaaggtcaggagttcgagacctgcctggccaatatggtgaaaccccgtctctactaaaaatacaaaaaaattagctgggtgtggtggcaggcacctgtagtcccagctactcgggaggctgaggcaggagaattgcttgaaatggggaggcggaggttgcagtgagccaagattgtgccactgcactccagcctgggtgacagagcgagactccgtcaccaaaaaaaaaaaaagagtttaaggccatttgccattatagctattattttatatttacaaaactaaacaaagaagacctgattttcagatgcttcttttgtcttccaacctaactcctcctttttaaggcagacatcagagtatactggaaataacatttagaatcaaagtgaccgggtttcaatcccaagtatggttttcttagcttagtgatttaggacaaattacttctctgagcttcaattaatttctttctttttctttctttctttttttttttttttttttgtaatatgaaggtaatacccatttcccaaattctaaggatttattggatttaaacaataacatgtaaaacattaggccagtattaggcattcaataaataaatgttagttccatctcccactatcttctattaacttgtgtttttctctcaattttccttcaaaaatgacaccaagttttgtctttttgatatcctttagtgctatcttgtttgtggcagttcaataattctattatataaaggtcaacctttttatttttcttaccttgctgagtttgctcactttatactaaaggcatgtagatacatcagctgattttgttcaggccgctaagttaaggcaatacatattttttctttttcttttaaaaaaagtttcttcttgtatgtccttccaacgagtaatttttctagttttaaacagccaaattcataataaaagtgatagctatgtttgttgaatattcagtgtgtaccagccacattatatgtattatctcattttaatccgaaaccctgtaagactagtatttttattatctccaaaaccaatgaatcttagggaatttaagtaagttgcccaaagttgcacagttaataaatggcagaaccaagattcacatccaggcaatcttacttgtgagctatcaaccaccacacactacttgatagcaccagaatagcccaaatctcaaattacccaatgtgtgtaattcagacaaattaatgccttgcagttctttctgaaagtgcttttatgcattgttggagatttaggagtgatacggttctggctacttatcaatattaaaatttttctctagcatttcttaacaattctatggattgctgttcttccctacaatataaaaattttattaaccttcgttaagttcaaaaataataatagtaaactcttacacagactttggtaaaagtttgacatttttctaaatgcttgtacttactaacttataggtttttaaaattttcatgtgtttcagagtttcctgaataagtttttcccaagttctgtgttattctttttgatgaaaggatactggcttccctacaatcatcttttcaacttctaaaatgtttaattttttaaattgaggtaatgctttaaaaatcaataaagctataatacaattctaaatagaacttctctacaatatgtttatttctttcctaagcttttaattctggtgctacacccaggttaatttaaaatgtattttctgttggtattgtattttattttattttttgagacaaggtctcactcttccgcccaggctggactgcagtggtgtgatcatagctcactgagacctcaaaccctcttgctccaactgtcttcccacctcagcctcctgagtagctgggactgtaggtgagcaccaccatgccgggcatgcatatatatatatcaatcaaattttgtagagacacggtcttgccatgttgccagggttggtctcaactctgaatctcctggcctcaaagggtcctcctgccttagcctcccgaagtgctgggattacaggaatgagccaccatgccaggcctatttatatagaatgttttcatttattacatctggggaatcatcttttcaagttaattagtcaatttgacagttttaaactaagaagatttaacagattctatcaatcctaacttcattccatcttaatgtcataaattagtaggttaattttgaaaaattctgccttttagttttaaaacttaagaccaaacaagtcaaccgaattgttaatcagttttattatgtaaaggaaggaagagaaagagcaggcttttgttttttgctgctcaactattttaatgaaattaacagtaatgagtaactttatctcagttggtcccatcttactgggatttttgtaacaattatcactgaattatgtactttatagtcaagaacatttttatgctatagatttttgaatatgtataatacattatatgaatctgtgtctcaaagagtcaacttacttattctttttatcttaaaagaataaattttacactgatctattactaagctaatttgacagctagagctagcaattggtatagatttgagctgaaagtgaaatgatgaactgaaaattggaattggttattagcatcctaatatgttttattattcaagtgatttaggacaagttacttgacttctctaggcttcataaatgatttttttttaactttattgagggtagggatcatgacttaaattttttttctatgtttttcaatacctcagtatattgtagggacttgttgagaacttgttgaatgaatatattgttcagagtttaccattactcagtattttagttgtcacatcttaaaatagataatcatttttaccatcacactcccttcataagatatagaaataaagcccttcttgtttggaaatggtggtattttggttttacttttttttaagttactgttgtaaggtactactttaatatttttatttaactttatttgtttgtctttagtaggactaagctaatgagagctttgacttgcttaaacgttgggcaggaaagcagaagagaaaagggaagtggaaatcaaaacaacagagaaaagaaaatgtacatatttgggaaatagaacatgttactaacatctgtgtcacataataatcagtggtaggttgacatcatttgcctagatgttcatgactgaagaaaaatttttcacttaaaaaaggaaaaacctcaagaggctgcctatgtttaaaaaaaaaagagcaagtattttcatttggtttttgatggaaatgataatacatttgaacattttttttcccattacaaagtactaaatgaggtcagacatggtggctcatgcctttaatcctagcactttgggaagctgaggcagaaagattacttgaggtcaggagttcaagaccagcctgggcaacatagtgaaactccgtctctaccaaaaaaaaaaatagccaggcatggtggtgcacacttgtagtcctagctacttgggaggctgaggtgggaggatcactggagcccaagaggtcgcggctgcagtgagccatgatcatgccactgcaccactccagcctgggtgacacagtgagaacctgtctcaaaaaaaaaaaaaattaatgctaaaatgtaatatgtataatctcatttaatcctcaaacattaatttgtttaaattttgaagatgcagagatagtctcatggagattaaattgttaatgctaagttacacaggtagtgagtgttagatacaggatttctaattcaaaaactttattttcttcctactgtttcataaatgttacatttagaaaattaagaaaagtggacatatgagtccgttaaacaaatatggcaacaataaaactgtacttgttaagtagtctgggcagtaacaagtaacagaagaaagtgaaagatacaagggactgagaaagaaatgacaaagaacaggaaagacagcatagcatagtggtaaagagaacaggctctggatttagactgcctcgtttttaattccaactctgccacttactaactttgtgatcagttacttctctgctgtgtatacttatctataaaatgaggataataatagtaatttacagggtaagtaataaagctacatcccttgcttttacatgttaaaacctatttatttcatcagcatccccgacctctacccactgggtgtcagtagcactccctttaattctaacaaccaattgggtaaggccaaattccttattacccttttctacaattcttgacatgctgtgtagagtacagtgtagggggataaggatagaagcagggagctccattagaatgctgttgtggtaatcttggtaagaaatggtagtgattagattctgcatatatttgaaggaaaagccaataagatttcctaatgggttgaatgtagactgtgagaaaaagaagtcatgagtgattctaagaattttggcctgagcaagtagaaagagattttatcaactgaaataggaaaacactaggtggggtagttttgggggaagaaaatcagaaattccattttggacatgttaggtttgagctgtctattacatctagctaaagatgttgagtaggcagttgaataagcaagcctgaaattcaaaaaagaagtttaggctagagatattagtgtggaaattgtcattgcctaaattaatagaactttctacaatgatggaaaaatgtttatgtctatactgtctaatatggtagacacatgtggccacatgtggattttgagcacttcaaatgtagctagtgtgactgaggtattgaatttttttattttagttaatttaagtagccacacctaactagtggccactgtattgggcagcacgagctatgatagtaaaaccataagactgcataagattaccaagagatcaagggtaggtcaagactgaaccttggaactctgcaactgtaaagggatctgagaaatgagaaagcagcaaaggagacagagaaggaggagggaccagtgacgtagggaaaaaacctggaggcccagtgaatccagcttgtcaaggaggaaagtgattcttttggcaaatatttccaataggtcaagtaagttaaggactgagaaataacccttggggttaccaatgtggagatctttagtgatccaataagaacagcttctgtatagtgataggaaagatatcatgattagcataggctgaagaaagaatgagaggatcttatttatcttgtgctttctattttttcccacctattttatatttttttctcctcttttgctttcctttagttcagttattttttatccttcttctttcccctctactaaatttaaggttatacactgctttctattaatagttaccttaaaataacaacatcaatgtgtgatgttgatctggacaacataaggacctttggacattttaattccaagaccttcgtctgactttttttttcccctttggtctgggattttagttctttttttttttggcttgttttattttttttaattggggtctcactctgtgacaaccaggctggagtgcagtggtgcagtcttggctcactgcaacctctgcctccctggttcaagtgattttcccaccacagcctcccaagaagctggaattacaggcgcccacaaccatgcctggccaatttttatgtttttagtagagacggggtttcaccatgttagccaggcaggtctcgaattcctgacctcaagtgatctgcccacctcgacccccgcaaagtgttgggattacagatgtgagccactgtgcccagctgtaattatttttttcaaaccctgtaatgtttattctcttacattcattaaatttcataaatctgtagataggtatctttaatggtcagccattatctctacagatattacttctgtcttcttactttctgattctccaattacatgcttttcagaccatctcattctatccttcatgtttcttaaacaccttccacattttctgcctttatttttctctctctgccacattctaggtagtttcttctgacttatcttctatgtcgttaattttctcttcaacttttaaactcattcattgagtgttgaatttgggctcttgaattttttttttcctaaaaattcactctggtccttatttaaacatactaagtcactttttgaaaatgtctactttttctgttatttatttaaacataggaaacattattttatatttttatttcattgatttttgtagttgaagttcttgtgggtctgtttctgcttttgtttcttgttctcactcatagtactttatttcctcatatgctaggttatttttgactcactgtttgttgtctttaaatgattgttagcaggacttctttgaggcctgcgatgaaggtgtatctttacaggaaagatttacatttgcttctattggttacctagaagtgctaccaagcaggttaatcttaaattacattcatagctttaagtgttccttgcaaattctcatgaggtgcagtttatggtaacaaaaaagctcatacacacacatgatgtggtcagtagttttgggtgtttttttatttatttttttgagatgagtctagctctgtcacccaggctagagtgcagtggcacgatcttggctcactgcagcctccacctcctgggttcaagctattctcctacctcagcctttcaagtaactgggattacaggagcgtgccaccatgcctggctatttttctatatttttagtagagacagggtttcaccatgttggccaggctggttttaaactcctgacctcaagtgatccacccacctctgcttcccaaagtgttgagattatagacgtgagccaccactcctggccagtttgtttttttgttgttttttgtttgatttgagacagggtctcactccatcatccaggtggctggagtgcagtggcgcaatcatagctcactgtagcctccaaatcctgggtttaagcaatcctcccgcttcagcctcggcctccaaagtagctgagactacaggcatgtgccaccatgcccagctagttttgtttgttttttagtggagatgaggttgtgccattttgcccaggctaatctcagactcccagcctcaagcgatctgcctcagcctttcaaaatgctgtgattacaggtgtggacactatagcctctggtccattttaagaagacttctttgtagttcccttgtgagggaataagccattttacttcttgttaaaccttactcttattgcaaaggtctttatagttccagctgtattgtggtggggaagtggggaaaggggatgatttattattataataattccttactttggatgaacactgagctttgacttctgtttcccaaatactacacaaggctttgaaaacctcagctggaattcttctggtacagcaaataccctccaggcagcagcagtttctttcagtcattttcctctcttggttctttaatttcacctacaaatggcctgattttccttactgtttttgatgcttttcaaagattttaaaaatattttattcagtatttttagttttttttccgcaggaaaaatgagtccgaatagcctaatctgttttattactgaaaatgaattgccccacttattttttagtaagctgaaaaacaagaaataactccatttaaggttagcaagtttctgataaatatttcaggcatatacctcattaagataacttcagcaaattccagtatttttccaatttgttattcatgaatatttattagtgatggataataaaatattttaaaattaaactaaattatttatcttccttgtgtaggactaacttcttcagtgcttagagtgtgagaaaaatggcaaatatgaatagtgattctaggcatcttggcacctctgaggtagatcatgaaagagatcctggacctatgaatatccagtttgagccatcggatctaagatccaaaaggtaagcatttaaaataaaacacatttcataattagggtctttaatgattaaaatacatctaattataaccaaacatgtatagatttgattataaaatatccactttcttacaggatttgtgtgtatacatgtggagagaagtaaataggaatactatttactggtttatatttgtttttttttttttttcactaaactcaacatctctgttgtgggagtggttggggtaactttacaaagtaaggtacattgatataattcatttaacaaatatgtattgattacccactttgcgcaaggtaatatgctaagtgctcgaggtagaagagtaaaagtaatagaaaatcttcatcttcattgaggtaaaatttcagcagatagtttaaaataatttgagtttaaattttatttcattgtatacctgtaaaacccaaaagaatccacaaaaaaattataaacagtaagagaattcaataaagtagctgcttacaaaacaggcaaaaataaatagacttccaatgagaaaatgtaagaaaaaataaaatacatagaaatggtcttgagtgctcaatggcgcccaggctggagtgcagtggcgtgatctcggctcgctacaacctccacctcccagccgcctgccttggcctcccaaagtgccgagattgcagcctctgcccggccgccaccccgtctgggaagtgaggagcgtctctgcctggccgcccatcgtctgggatgtgaggagcccctctgcctggctgcccagtctggaaagtgaggagcgtctctgccccgccgccatcccatctgggaagtgaggagcgcctcttcccggccaccatcacatctaggaagtgaggagcgtctctgccccgctgcccatcgtctgggatgtggggagcgcctctgccccgccgcctcgtctgggatgtgaggagcgcctctgcccggccgccaccccgtctgggaggtgaggagcgtctctgcccggccgccccgtctgagaagagaggagaccctccgcccggcagccgccccgtatgagaagtgaggagcctctccacccggcagccaccccgtctgggaagtgaggagcgtctccgcccggcagccaccccgtccgggagggaggtgggggggtcagccccccgcctggccagccgccccgtccgggaggtgaggggcgcctctgcccggccgcccctactgggaagtgaggagcccctctgcccggccagccgccccgtccgggagggaggtgagggggtcagccccccgcccggccagccgccccgtctgggagggaggtggggggggtcagccccccgcccggccagccgccccgtccaggagggaggtgggggggtcagccccccgcccggccagccgccccgtccgggagggaggtgggggggtcagccccccgcccggccagctgccccgtccgggaggtgaggggcgcctctgcccagccgcccctactgggaagtgaggagcccctctgcccggccagccgccccgtccgggagggaggtgggggggttagccccccgcccggccagccgccccatccgggaggtgaggggcgcctctgcccggccgcccctactgggaagtgaggagcccctctgcccggccaccaccccgtctgggaggtgtgcccaacagctcattgagaacgggccaggatgacaatggcagctttgtggaatagaaaggggggaaaggtggggaaaagattgagaaatcggatggttgccgtgtctgtgtagaaagaagtagacatgggagacttttcattttgttctgtactaagaaaaattcttctgccttgggatcctgttgatctgtgaccttacccccaaccctgtgctctctgaaacatgtgctgtgtccactcagagttaaatggattaagggcggtgcaagatgtgctttgttaaacagatgcttgaaggcagcatgctcattaagagccatcaccactccctaatctcaagtacccagggacacaaccgctgcggaaggctgcagggtcctctgcctaggaaaaccagagacctttgttcacttgtttatctgctgaccctccactattgtcctatgaccctgccaaatccccctctgtgagaaacacccaagaatgatcaataaaaaaaaaaaaaagaaatggtcttaacatgaatgtgtaaaatctatatgagagaaactaaaatgcttctgacataaaataagatttagagtatttcataaaatctgagatgctactgattataaattgcatatttaaaaaaaagttaacactaagaaaaactgctgcccataactctgatgcaataacctcttaggacttagagtttttgttttgtatttactgcaagagctcttgggccacgcacggtggctcatgcctgtaatcccaacactttgggaggctgaggtgggtggatcacttgaggccaagagttccagactagcttggccaacatggcaaaacctgatctctactaaaagtacaaaaattagctgggcgtggtggcgcacacctgtaatcccagctatttgggagactgaggcatgataatcacttgaacctgggaggcagaggttgcagtaagccaagatcgtaccactgcactccagcctggtgatagagcaagactctgtcaggaaaggaaaggaaaggagaggagaggagaggagaagggtggggagcggaggggaggggaggggaggggaagggaagggaagggaaaagggaaaagggagaactcttggacttatgtgatattttatcctatatttcttgtgcaattataaaaatgaaaatagaaacaaagtatattgattaaggtattactgacacctcacatttagaatatgattcttctgaattattttttgatgtagagtcatcaaaatagttgtttcccccaccacacacacacacacagaattgtccttagtgccattaagaaccctggtgctgtaacatttcctgaaaagattttcttccaggtcactgacacttaagttttgatgcttgcactttcctgatcttaccagaagatgtcacaaaaggttttctaacaagaacatgacccatctgtcttcctcaaatggtccttaaatggtttgtctgacatgaccacggatggcagttacctgtcatgccatcaggaataactactatcatattgtcacttgctgacagtgattttttttttttttttttgagacagggtctcactctgtagcccacactggagtgtgatggtgcaatcatggcttgctgcagccttgatctcctgggctgaagcagtcctcccacttcagcctcctgagtagctgggactacaggtgcatgccactgtgaccagctaatttttttttaaattttattttgtagagaaggggtcttgctgtgttactggggctggtcttgaactcctgggctcaagcaatttgtccatcttagcctcccaagtagctgggactacaggtgcacaccactgcacctggctaatttttcaaatttattttttgcagagattgcatctcactttattggccaggctggtcttgaactccagggctcaagcaatcctcccaccttgccctcccaaagtgttgggattacaggtgtgagtcaccacgcctggctctggcagtgatgaaaaagtgttctagattatgagattcatccttaattagaagtgtttaaatatgtatattagaatcagtaaaatatgatgtaataaaaagaattaaatgaggcatattctgctctcattgggaagactctgaagatgtcatagtcttcaaattttaatccataaatttaatgtgatttcccccctaaaatgccagcagcctattccaaagtttatatggatcagtaatttcacttctaagcattaattcacattgtcaaaaattgtatgtgtacaaggttgtgtaatgcagtattttttatagtagtaaagattaaaagcaatcaaaatttcttacaggattggataaataagttgtggcacatttatacaatggaatattttttcctcttaaaaaggaggtggctttattacatatcaaaatggaacaagtcttcaacttattttgttaagtgaaaaattgaagtacagagcagtgtgtatagtatgccaccatttgggtaaaaataaataaatataatatgtataaatgaagttttgggtagtaaataggaaactgtaagatggttgccccctcagagggaaactgagtgctttaggcgggatggtgtggcagatactgttaggtagacacccaacaattaatcagcaaccctacctattccttaatgtcaacagaatccttatttttttgagtcacaatgggtcttcatccaagagatgaaagatggttggtttaagctaatcttgataatcctattttcattcgcacatacttaagtttttagtctttcttaaaactagaggtggaaatgtgaaatttatcacatgagaaatttatcattgtcatttatagtggccatcagaaaagataatgaaataagacttttgattcttacttatataatccaatgtcagtaaatataagcactaatgaatgctgacttgaatgctcagggttttcttgaaaattctaaattctgtgataaataattgaccactgtgacaacagaatgtaagtcattaaagtgcattccattacagtaagttggcaggagttcaaacagttctctgtaaatttgtttaactgcgtagattaaatggcaatatattttctataatgaaacttgttgaaatgagagggaatcagctatttacaatcatggcataactacctaggtaagcatgttttaagaaaggcaaatatagagacttagcagtactaaatgctaatttgcttgtggaataatttgtttaggaaaacaaactatttaatgagaaaaaatgtaagtaccttcaaacattgttatttctgttaaaatatggattacttcacattacatatataaataaaactcatctacactgtgggaaaattatcttccatttgaagaaccagattaggacaactatttccaaaactgtagtcattttagagttaccttatgactttggcaatatcttcaatagtacctgtataatataagtgaatgtttcttcaaaaatctatttactttttaaaattagggttaatttagcctcaacccagctttgtaaaacgatggatttgaagtgttgtttatgctttttttctaatacgcattgcattaaataccaactagtttaaatagcatttattcttgtgctacttacaatcatcttacatattaccatactttgagaaactgtctttggctgtcagagtatgtcaagtatatatttagattacttatcctcagtttagcttgtggttttctatctcttccactaggtggcaataaaaatcacataattttaataactgctttggactgaaagtatgatggttcgcttatccttttagtggaactggggtctaactaaacttaggtggaggaaggagcttgttgttataggggaataatatatgtcaagtcatttggggggctttttcaaactatgcaggcctactttttattctgcatacccctcccccaccagttttccccctgatttgggggtggaataaggagtgtgagtggagggacagaaaggtttagaagtctcctatcttgatatatgtgctacattccattagcaagtaccagtctaagaggttactttcctgtttttctcagactttctggtagccaaagatagaacctgattttcagtattgcttgatgttgctgcatattcaggattgctgctattctcggactatgccctggggaagttgcccatccagctagcctacaaacagattgtgaaatagttaatttgtttttgagcttctcttgtttttcagtctttctctatctctgtttcctcttcttccattttccccagggcctagggatttcatatccttctctgtatgcccagtattacccagggcaggaattcactcagacttaaccccttaggcaattctttgtaaaccatatttttcttctgccccttattcaccagtacttatctgtcctattccctccagggctctgttgtcagcttggtattataatggaaaacaattggatatgtcagagacttagtctattacatttccatggctatttgcattttaacatggagaatccggtaaatatgaagtcctaaccaaaagtttcaagatttttctaactgagaacatttcaggtgctctgataagccaagtggggtacaggcagcattcctactgcccttcaaacaacctaggtatgctgtggcactcttttttataatgtcctctagcgtgcacatctgtaaattggtctttctgttttacctgtcactaatactgtcactatagagcagcctaagttgactctttttggtacttaaggtcttaggagagaggaagaaggaaaaatatataaggacaaagaatttgagagaataaaaggattctgatgggattgtaaataaggtcgcagtctaacaagtttatatttagatttaagacatctctaactccacatctcagattgtcctcttagcactttacaaaaagttcctttggggaatctagtacaatgatatttactaaggcaaagtgaagagtttatctattaataggtaacagtagatagatcctggcccagtgacagtgattggaagtaattgaggcttgatggtttcatagctgggattatacagatgttcaacaaaagacagaaaagtagttttcccaggaggggtggtttccagagttgtataaattatattttgaggaacttgacatcagtgttaaacagatggactaggaccttggtcattaatcagtggctagtgcggatggccaacttgctaattgtattacttttatacccttctccatcctctttcccttccattctctcacacttgggcctccctctcttctctccaactttccactgttacttttcctcaaaggaactgtctttttgctaaacacttgaagagtgtttagcaaatcctggccttagagtcagagatgccttaaatctaaatacaggcaaggcacagtggcttacacctgtaatcccagcactttgggaggctgagggaggtgtattgcttgaggccgggagtttgagaccagcctgggcaacatagcgagatatatgcaaaacttagcaaatttctacaaaagcaaaaaaaatctaaatacaaactttgttagactgggatcttatttctagtcccattagaatccttttattctttcaaattcattgtccttatatatttttctttcttcctctcttttcaaatagttttgtttgcttaattgcccttttgtatccataattgcttgcctgagtggcttctttctttcctagatcaatctgttctaattgattttactatttgtttacttgcctggaagctagttttgctttatcatcttttcttcctgtctcattattattatgatgcttctccacttattttggggtgttcctgataaacccatcataagccaaaaatatcctaagttgaaaatgcatttaatacccagataaaaccatcataaagtcaaaaaatcataagttgaactgctgtaagttggggactgtattagagaagcctgaagaaagagggagcctggttgggtttgactggtactctttagggccaaatcaaaagtgtgggttttttggaggaaataatatgaagggttgggctagcattgttctctgtctgctcaatattgtaacacatccaagtatatatttagtcaaaagggttttagtgtaatagtataattatgctataaaagcagtaaaaccaattgcaagtatataacaagagatttgaaacttcttttaacaagcagacttaaaaccaaatattattgaattgatggaggcacatgaaatgccagtgtcttgttatagctcagtggctgactataggccaatgataaggaattggtgtgaaaattacacattgagattatgcatctttggcttgcctgatactttttttagtctcattctgaaattgtccccgaagtctattacatagcttttctatgccttattttaagttaggagatatgttttctataaaatcatattgggaattgttttggtgctatacttataaaaagccctggttcatttgctagaacatcatgcttccttattttttctacttcagtagtttatagtttatcttggtatattatcactacttcaactaaggttatttttatctttgtttagtgtatacagatctgacctgatacttattctaacactagctttttaaaataacactagtttttacttatgtctatcaaaacttctgcttttttatttacctatacttcatatacagaatggcttctagttttacttctcttaaattgtcttattaatttcaaatagaggcaagcattggccttctttattatgtctttgagtgtagctatgcctgggaatttacatgttaaaatacaatttcattatgttattttcatttctttctcttttctattatagtgagagttatttttattttttaaaaattatgtctctaggtagttatatattttctattttattaaggctagtaaatggggtattaaaaataattgcttaaagaggtcatgccctagggccgggcgcagtggctcacccctgtaatcccagcactttgggaggccgaggcgggcggatcacgaggtcaggagatcgagaccatcctggctaacacagtgaaaccccgtctctactaaaaatacaaaaaaatgagccgggcatggtggcgggcacctgtagtcccagctactctggagactgaggcaggagaatggtgtgaacccgggaggcagagcttgcagtgagccgggatcgggccactgcactccagcctgggcaacagagtgagactgtcttaaaaaaaaaaaaaaaaaaagagattatgccctaattcatacattgctggtgggattgaaacatggtacaaagacaaggatgccctccctcactactcctattcaacatagtattggaagttctggccagagcaatcaggcaagagaaagaaataaagttcattcaaataggaagagaggaagtcaaactatccctgtttgcagatgacgtgatcctatatctaaaaaactgtatcgtctcagtccaaaagcttcttaagctgataagcaacttcagtgaagtctcaggatacaaaatcaatgtgcaaaaattgctagcattcctatacaccaacaacagtcaagccgagagccaaatctcgaatgaactcccattcacaattgctacaaaaaactaaaataccggccgggtgcagtggctcacacctgtaatcccaacactttgggaggccaaggcgggcggatcatgaggtcaggagattgagaccatcctggctaacacagtgaaacactgtctctactaaaaatacaaaaaattagccggacatggtgacacgcacctatagtcccagcactcgggaggctgaggccagagaatctcttgaacccaagaggcggaggttgcagtgagctgagatcacgccactgcactccagcctgggcgacagtgagactctgtctcaaaataaataaatacataaatacataataaaaaaataaaatactaggaatacagctaattagggaagtgaaagatctctacaaggagaactacaaactgctgctcaaagaaatcagagatgacacagacaaatggaaaagcattcatatgctcatagataggaagaatcaatatcattaaaatggccatactgccctaagcaatttatagattcaatgctatttccattaaactaccattgacattcttcacagaactagaaaaaactttttttttttttttttttttttttgagacggagtctcgttctgtcgcccaggcgggagtgctgtggcgcgatctccgctcactgcaagctccgccttccgggttcacgccattctcctgcctcagcctcccgagtagctgggaccacaggcgcccgccactgcgcccggctaattttttgtatttttagtagagacggggtttcaccgtggtctcgatctcctgacctcgtgatccgcccgcctcggcctcccaaagtgctgggattacaggcgtgagccaccgcgcccggcctagaaaaaacttttaaaaatacatatggagccataaaagagcctgaatagccaaggcaatcttaagcaaaaaaaaaaaaaacaaaaaaaaaaacaaagctggaggcatcatgctatccaacttcaaattatattacaggagtacagtaaccaaaacagcatggtactggtacaagaacagacccacagaccaatggaacaggatagagaacccagaaataagaccgaacacctacaactatctgatcttcaacaaacctgacaaaaacaagcaatggggaaatattccctattgaataaatgctgctgggataactgagtagccatttacagaaaattgaaactggaccttttccttaaccatatacaaaaattaactcaagatggattaaagacttaaatataaaacctaaaactataaaaaccctggaagacaacctaggcagtacctttcaggacacaggcacaggcaaagatttcatgatgaagatgccaaaaaaattgcaaaaaaggaaaaattgacaaatgggatctaattaaactaaagagcttctgcacggcaaaagaaactatcaatggagtaaacagacaacctacagagtggaagaaaatttttgcgaactatgtatctgacaaaggtctaatatccagcatctataaggaagttaaacacattcacaggaaaaaacaaccccattaaaaagtgggcaaagaaatgaataggcagacacttctgaagacatatatgcagccaacaagcatataaaaaaagctcaatatcactgatcattagagaaatgcaaatcaaaaccacaatgaaataccatctcacaccagtcagaatggttattattaaaaagttaaaaagtaacagatgctggtgaggttctggagaaaaaggaaggcttatacactgttggtgggagtgtaaattagttgagccattatggaagatagtgtggtgattcctcaaagacttaaagacagaaataccattcgacccagcaatcccattactgggtatatacccaaaggaatataaatagttatattataaagatacatgtacacatacgttcactgcaacagtatttacaatagcaaagacatggaatcaaccaaaaggcccatcaatgatagactggataaagaaaatgcatacaccattcaatgctgtgcagccataaaaaagaatgagatcatgtcttttgcagggacatggatgaagctagaggccgttatccttagcaaactgacagaggaacagaaaaccaaataccacatgtactcacttttaagtgggagctaaatattaagaacaccatggacacatagaggggaacaacacacactggggcttactggaaggtggagggtgggaggagggagaggatgaggaaaaataactgatggatactaggcttaatgcctgggtgatgaaataatctgtacaacaaacccccatcacacatgtttgcctatgtacataggcacatcctgcacgtgtaaccctgaacttaaaagttaaaaaaaaaatgtacagccatttttgaaaacagtttgatagctcctcaaatgttaaatacagagctatcatatgacctagcaattctagttctaggtatctatccagagaattaaaaacatatgtctacacaaatacttgtaaacaaatgttcctaacattcatgatggtcaaagtggaaacaactcaaatgtccatcaactgatgaacaacaatatgtatcaaccttgaagacattatgctgtgtgaaagaaaccacacaaaaaagactacatattgtatgattccatttatataaactttctagattcggtaaagccatagaaacagaaagtagattaatggtttccaggggctggggaaaggggaaaatggggtctgggacttcttttgggatggtaaaaatgttctaaaatggattatggtgatggctgtacagtcatcaatctgtgaattgagagattaaggaatttgggctgaccaagttgttgagaataactagaaaagctgacaaaatgtttttaaaaatatgcttgaagacataggacaactaataagacaatgtagaataccgaggtctaaatcaggaagaagacaaagccagaaaggagagcccagcatttcctcaagaatatctgccaattccagtttattagctgagaggcttaaaacagagcttttggccaggcgtggtggctcacatctgtaatcccagcaccttggaaggccaaggcaggtgaatcatctgaggtcaggagttcgagactagcctggccaacatggtgaaaccctgtctctattaaaaatacaaaaattagttgggcatggtggcaggcgcctgtaatcccagctactcgggaggctgaggcaggagaatcgcttgaacccaggaggtagagactgcagtgagctgagattgcaccgctgcactccagcctgggcgacagagtgagactccatctcagaaaagcaaacaaacaaacaataacaacaacaacaaaaaccagagtctttgccagcctatagggctagaggaagaaaatttggaatccagggcccactaagagagacttcacgtaaactttaggttggaagcccaaagggctacagcctagaaatgtgaatgaatttgaaatagaatggcctcctttcaggaactgaagcccaactttaactcatctcaatcccccaaactggattaaggtgatctaggattgctcctgtctcaaattgacttcccaaagccaatataaactctttctaaagaaaatactttaggtttcaagttatttatacagtttttttatttacaatgtcaggaacttgctaaaaactagccaagtgtaagagaagccaggacaagatgattggaaattaagaaactcaatacacaatagaaagagacttacaggtgatccagataatggagttatcaggaacagacttttaaagaactgtctttaacatgttcaaggaaattaaaataagactgagaatttggcagtgactagagataaatatgaaaaaaataaatttgtggaaaatgttttttcaaaaagaatcaaatagaaattctgtaattacagtacccaaattaagaaatcagtgacaataatgaatgttgactagaatgtggaacagtgggaatgctcatatagtactagagtaagtataagtacagtcattttggaaatgagtttgtaattatctgctaccattgagtatacaccacgtttataatcagtaaaaatgtatgcacattgcacaaagggacatgtaagagaatataaattagaattgatttataagagctccaaagaaacccagatacccatcacaggaatggataagtaaattgttgtgtttttatataatggaatgttatacagctatgaacatgaacagactgtagctacatacagaatatgggtgaatgtcacaaagataatgttggcaaaagaagccagacagaaaaatatatattgtattattctactttatgagaagtttgaaagcaaatgaaactaatttcattcatgtgtgtacatatatgtgtctaggaaatgcactaaaatgttaacagtggttatttctgataggtgatttcattttcttcaataacttcttgattatcttaaatgtagacaatgtgctacatttctaatgagaacaaagttattccgaaaatatggcattcctataacttaggataaaaatggtatatacaaaatgaaaaactcattttcttaaaactttgtttaaattaccttggtagtctcagctactcaggaggctaaggcaagaggattccttgagccgaggagtttgagtccacagtgcactatgatcgtgcctgtgaatagccactgcactccaacctggacaacatcatgagacctcatctgtaaaacaaaccaaaaaaccttttggtatatttactgtatttactcctagccttcttttctatgacgtttttaggtgagatcacatagtatatgtaatttattgtgctgctttttcattttaaatttatattacatgccatcattacttctgcaagttattcgctagttgtctgtctgcctgcctccttccctctcttcttctcttcttccccacctccctgccatctttcttccctccctccctccctcttttcctcctctgcctgcctgccttccttccttcttctattcttttgtcagcaaacattcattatgttccttctgtttgccagacactttactcaaacacagctttactgaaacacagctccaccctccagtgggggagatggatacctagcaaaaaataaggggtgctaaatacttaattttatgtgtataaacacacacacgtctgtttttgaggcatggtctcatgccatgctggagtgcagtggcacgatcatagcaccttgtaactttgaactcctgggctcaagcagtcctcctgcctcagcctccctggaggctgagagtacaagtgcatgtcaggatgcctggctgctttttctattttttgtagagaaagggccttgctgtgttccccaagctgttcttgaactcccggcctcaatcagtcctcatgttgggatcacaagcatgagccaccacacccagcctatacatgtatatatttagaactcatttttcattaggaaaaatacaaattgaactcatcctgtactagcattaccaagaatcctgtggcatactcctgtgagtgactatgctataggttctggttgtaccagcagtggaatgaggccatatgtaatattgatgaccaggtgccttgggaaggtttctgtgcaggtgctgctctgtgcaagaacatttattgtagttgttttggctgaggttgaggattttttgtttggcttttgtttttaaatgtgagaggtaaattttgcaagggattaagcctaatgacacctagggacatctggttataaatattacctattttcctgaaggaaaaacctattcagatgctccctggcatggatctgttaagggcatgtaggctcctccctcattcatctcctttgcccgtcaaggaggagagtggaagactcttttccacatctgagtccttaagggggccttaagatggtctaggacaagagttggtaaatttttttctataaaggacacgttagtaaatactttaggctttgtgggcatacggactcaactttgccgttgtggagtgggagtagccatagacaaaacataagtgcatgggcctggctgtgttccagtaaaaattttatttacaaaaacaggacatttatgaaaacaggacatgggcttggatttgttttatcaggccatagtgtaccgacccctggtctgcacagaaggactctaatgtcagcaaccatagggacttgtacttcgtactgctgtgacacccatagggatacctcttgccttgtttctgaggaagttaataaaaaggtcaggctcgttcaccttaatttcagtctacccccacagttctaataaaaaatgttctgatcaaaatggctctttggacaacaaaacagcaaaacagtctccagcctctcctaaaccctgaagcaaacctgcagtcctttggcaaggtcatccaaagattttaactgccataaaccataggggtagagactgaagctaagaatgatagataaggggaaagtactggctttcaaacagtagtaaaaagttgtatgataaaaattgtccttaagactcactgaaatgccaaaagaagaaatttgttttacaagcactcttccatattaggaattctttctaaatatcatcttaaatttaaatatacataatttaagagtgttttaatattaaaatgtttacatttttaattattttaaatgcggttattagcagctttctgcataatttttatatcatattttgatttctttctaacagagtctcaaagatataagtattataatgaagggtatgaacagaattaaggttcgtaatatatattgcaaattgctttctagaaagattgtgccaacttatacttctactagcaatgtgtgacagttcttatttcagcatatactttctagcactacttttttctttttttcctaaaatatctcatatttagtttgtaaaactttcctatggataaaaattagttgataggagccagttggcagggcaggtttcactttgagctgttgcctttatctgttctgttattctgggattgatctgcagaatgcgactagcaatagattctgatcaggctactacaatatttgccatctggattgaaaatacagccatcatcttttgaatgaccagtttgtgtaaaccatttgttgacagtgtctttccagtggtaaagcagaatttctctttgtctgtctgcctttcttgagagctatgatgaggatttctaaggcttgatgtatagaatcctttccttaagtgccttgtccatttggtgctgtgtaaggaatacttgagactggataatttataaagaacagaaatttatttctcacaatctggaagctgagaagtctgagatcaaggcactggcatttgatctgacacgggccttgttgctgtgtcatccatgtcagaagagctgaagaacaagctagccaaatgctatgctaagcctcttttgtaagggccttaatgaggggggacccctcccggcctaatcacctcctaaaggctccacctcttaatatcatcacattggcaatgccttaattttggagggaacacactcaaactatagcattaagatatgggaaaggaacaagaaagagtctatttttctttggtgatctgtttaaggagtagatgtgtttcgtttgcatcacatctatgtacagtattaaaaataaaatgtatctctctctctctctctctatatatatatatatacactgaaacctttactgtctttcattgtctttctagtttttaaggataggaaattttagttaaaatgctagcctggcatttttcttattccccacttttatttcccccatggggaattgggttatgaaactggaaattttattaattttccagaaattgttctggtgggtttgtgtaaggaggagagtaataactggcatggcattgcagttactctttatttataattaagacatgctctttatttcaaaatattaagttaataatactcttaacttattgcacttaagtagattgagacaatttgcgatttattttgacatcctaataaagtggataaaaggagaagctgcttggaaaactttcccacttgggaattttttccacattcctaattttcctttgtggaatgtcactcaccatttcccatttggaactgctctttctagatagtagatggaatggagtggttgcagtggtggtggtggtgttactgtttacatcaacctagagaaaaatggaagcatcttaacttggttaaaatgtttctgttgtttatataattctttaagcctcattccagtgttgctgctattaaaaaaaaaacaaaaaactaaaaacttgcatttcttttactgatcattttgtagacatagaaataagagattctcagcatagtagaatttttaaaaattaatggatttttttaaaaccaaaatttaagaacataaattgcattgaaaagaattttgaaatttattctcagcagaatctgtaataaaatacatgggccggagaattaattttcaggtcaagttctttgtctatatgttgttgatgaagttgttttctttcagctaagtaacagtttggaattctaaaacagagaactcataatcttcaaccaagtgtttattaacatttactttcttcaaaagctttttcaccatgccacttagttaaaaaaaaaataacaatcttaaaaaaatgagactgcttatgtgtgtgtgcatgcacatattcatttgcaaattatgtacatatacttctatacttacatattatatactctataaaacataatagaaatttttaattattagaaagacataatcttgataaaattaactttaaatttgatttattggcagtatagtcaattttttgttttcactttaacattgtaatagtctttattatttaatagtttgtcacacagtaatttaaactgattcaaagtttactccaggccaggcacagtggctcatgcctgtaatctcaacattttgggaggccaaggtaggaggattacttgaggccaggagttaagaccaacctgggcaatatagcaagacctcatctctacaaaaaattaaaaaaattaatcaggcatgtggcacatgcctgtagtcccagctactcgggaggctgaggcaggaggattacttgagcccaggagttcaaggtaatagtgagccaatgatcataccgccactacactccaacctgggtgacagagcaagaccctgtctcaaaaaaaaaaaaaaaaaaaaaaaaaaacaaagttcatttcagtcttatccaacaattacatgtgatgttttttgttgaaatttgcatgatgaattttcatcctccataatatcattcaattcttacatttagtgattgcagtactagtttgtatatttagtattccatgctattttttaagctcaaaatactagtgttttcattgatttaatactgttaatttagaaacaaccagtaattggctgggcacagtggctcatgcctgtaatcccagcactttgggaggtgaaggcgggtggcacacctgaggtcaggagctcgagatcagcctggccaacatagtgaaaccttgtctctactaaaaatacaaaattagctgggtgtggtggcacatgcctatagtcccagctactcaggagactgagacaggagaattgcttgaacccgggaggtggaggctgcagtgagctgagattgtgccactgctctccatcctgggcaagacagaacaagactgtctcaaaaaaagaaaaaaaaaccagtaaccttgttcaccttttgtggttttctgtctagtctgagtttttctctctagcctgtcccctaagctctcctctcttctacttttctgccttccccttcatttctgacaccctcctagctctactttaccacccaattgttccagccactaccctccctcccaacacactacacacacacacacacacacacacacacacacacacacacacaataaagaaaaaaaaagtattgatttagagggacccctcagaaggtggcaagtctctctgttgggggaaggagaagagttgatagacagaacaattcttgggcaggcatgttggctcacacctgtaattccagcattttgggagacagaggcaggaggatcagttgagatcagcctgggcaacataacagccccatctctaccaaaaaaaaaaaaatttttttttttaattagctgggcacggtggtgcacacctggagtcctagcttcttgggaggctgaggcaagaggatcacttgagcctcttgttgctgctgcgagctatcagcgcaccacggtactctagcctgggcgacacaatggaaccctatctcaaaacaaacaaacaaaaaaagacctacaattcagtagcttctgtacagagtgaaggagctgcctagctggtctgaaagttccattggaggagtactaaacactttaggaaggtcctgaagtctttctggactgattacttgagaggtgtcattttgaaagacacactgggtggaagtttacaaagggtaaagaagcattgcatacagtcatattgaatactttacgttagaatcataactgtttaatgtttatgtttttattttttaatgtttatgttttatatattaatgttttatttgatactttataatgtttgtaaatttccacatttgaagtatgttgagtatttaatttcactgatttctaaacattgttacacttctgcacacttttcaattaaaatattagtattaatacttgcattacatggagtaaatacctagacactggtagtgcaatttgctttagaattataattattactttgatttttctgtcatgtttaatgtcaggttcaaagaccatttaaattcttcatttggaagtttttaaatcttagaaaattttgaatccatgtgtgtgaaattgcagatgggagtttttattggtgacagacatgttcagcaataaaaccatctaacaatggaaacatttctaaacatttattatcagaatgttctttgtgtaacatgttttttttttaaagcaactactttctcagacgattaaaataccatctttatcttgaagggagataaattaagtatgtgggatggggttgtttttgtttttaatatctgctgtgtacctacgtagcatactattgacacctatgtgtcgtcgtagaaaaagtcttcaaattcggagcagttgtttcttgtagaagaaaaataggtagcttgtttaagtttgccacaacataaccaatacatttctgtatgatacaaaatatttttgagtctctctactaaattttgaaaggatgtgtccacttaaaatctatttttaaaggcttatctttggtatatcacatgtacaaagaagtgcattgtatatgtacaatttaagaaatttataggccagtatggtgactcttgcctttaatcccaacactttgggaggccaagacaggaggattgcttgtgccagaagtttgagaccagcctgggcaatatggcgagaccctgtctctataaaaaaattttttttaattagacgggcatggtggtgtacgcctgtggtcccagatacttgggaggctgaggctgaggcaggaaagttgcttgagcccagatggctgaggctgcagtaagccatgttaatgccactgcactctggcctaggcaatagagtaaaatcctgtctcaaaaagaaagtaagaaagaaagaataataaagccaacacccatccaagcaacataaggtcaaaacacagcagtaacctaaaagttctccatgtgtccttcaccaaacacatcctccatcctccctagggatgaccactatcttgactttgtataataatttccctacgctttataatagttttattgtctgtatatccctaaatactgaattcagttgtacctggttttgtaccttatttggggtacagaccttcttaagagtgatggcattgttattaaatttcagagaagcataactggtcagtaggagggtggagacagatgtataagccaaaaatttttaaggaatttaaggagtggaacctagaaaaggtgttaggtagaaataaggtttctctgtttatacatgtattaaatgaaaatatgaggtttgactcatattttaaaatattttgtacattttgcttaatattaaaagcattttttctgtggcatgaccataaatatttataaggtaagacaaatatgacttatttatttttagtgtggcacagctgaactacatttcaaatgagaagtaacattgatagggagcagtaatgtgaaactatgttcaaaaaaagaaagcccaagtttcaaaagtcttattctgaatattgttctctgtatagtattgtttaattttaaaagtgttttcagatccaactaaagttcaatttaaaaatatagtttatattttttcttctcaaatgaagctttaagcatatgtttctaataattcagttaaatatgctgagttgtatattttttgaagagaatctgttttgaaaagattccaaaatatttgtttgaacaggcactcagcatctcgatgaaaactgttggaaaagaaaaactttcagagtcattctgccctcagagtagtcaagccaactaaactggtacagttaacacttctgtaagaaaccaggagccaagaaatttagcacttcctgactgcttttcagcaagcaggcctcaaaccaacttagtggttggaaccaataatattgaatttttaaagtaaaaggctagcagtagaacatctacatctctttctatcagtatgatatttatcagtctcttttggtaatccatgactagcttcaatctttgccttatgttggtattaaagctatcattctttcttgaattttgtagggcatcatttttgcaaagcaaaaagagaatgcactatagagtgtgaccccaggtataattaaaccatctgccagatataaatatttttatgttgctttttagtaccactgagtgtcatagtggagatgcaaattatattggacatcataatgctttgggataattggtagttacagcagactaccaaatttacaagtagggattgctttttcagcttctgatccattcatttttattatatccctttgaaatatattgacaccacttaattcacttaacaataatatgcttattgtcttagttccttttattctgctgtaacagaatacctgagactgggtaattttaaaagaacagagatttatttcttatagttgtggagactgggaagtccaaggtcaaagggcccacatgtagggagggacttcttgcttatcacaacattgtggaagggccaaagagtacgtgagagagggtaggggaaaggaagggaactgaactcattcttttaccaggatcccactcctatgatattaacctgctcccaagataacgtcattaatctgtttgtgaactcagagccctcatgacctaatcacctcttaaaggtcccactgttgggactgttgaattggagattttcttccaacacataaactttgggggacatattcaaaccacagcactagtatatataatatgtcatattgatccctatatccacatatttgctctataagtgctctatttacatattcattgagttgacctatatagtacccagcatatttaggttttgcggtagagaacaaatagtaaaagattcaaagattctgtatgctaactagagagataaaactaagtttaacacctctgctaccatttctcaaatatcacagaattaataagaaaaatagcagaaattaaatgttcagtcacttggcttttcaagtacttcccacaagattagattaacggctgggtgaggtagcttatgcctgtaatcccaactctttgggaggccaaggcaggtggatcacctgaggtcaggagttggagaccagcctggccaacatggtgaaatcctgtctctactaaaaatacaaaaattagtcaggcatggtggtgcacacctgtagtcccagctactctggaggctgaggccagaaaattgcttgaactcaggaggtggaggttgcagtgagccgagatcgcaccactgcactccagcctaggcgatagagtgagactctgtctcaaaaaaaaaaaaaaaaaaaagattagattaacagtatctccagaaatggttaccatatgttactacattttaagttcctttcagaaccataagtatagaggagttagtggaaccaatgataaatctggattttttttcttctttctttggatctgtgcctgaaatggcaaattatgtgcaatttggggcacagtgtcacttatgatttcaaggagcctaagaatcagcagagggatacagtcttttgataaaactctgcctggtcttttcattttggatagtatattactggaaacttcagaagaaaatgagggagtttcagaaaggaactgaagaggttgatgactgaaaaggatgattgaacaccaaaatctgcagttgattaggatgcagacgtggaaaggaagcatgtatataaataaaagggtatgttactaaaatccgcaaaaagtagaatgaggcaaaatatctccattgtcatgatgttccattttatactgagttggataagtctcataagggatctgatagttgaggtcactaatccttaatacatgaaccaaggaataagaattctgtttatcataggaaataacttgggcccataaggaaggagtagagactcttcaggagagggacattttagtccataatttctctgatttagtgccaaaagcttttttgagagactattcaaagctgtcttaagtttcattgttggaaattgatagctgctgtatttctttttaataactgttttaagttctttctgttttgtcttctcggttgctaaattcctgaagattacaaaaaaagtgtgcttaaagtaaaagtgttatgagacaaaagctttattctgtggataggataatacttcttttgtgacattttctgtttgcaccaaaagtgagaagtcaatgccttgcctttgtgcatcccattactaatggaggataagaagttattttcttcaaaggctgacttccagaatttttggctgaacactttttgtcaagtgtatattccctttgtaggcctttctgtatagagcccacaaacatcgtgaatgtgaatcatgtcattcagagggttagtgaccatgcctctgccatgaacaagagaattcattactacagccggctcaccactcctgcagacaaggcactggtaagagacaaaacattactaatagtctaaaattcagttgaaatgaacagtgaacaatataagccagggcacctcccagtgattgaacttctttctgactgtatttcaaggacagcatcatgcaaagtcaaagatagtaattaacacacatcctacatctcaggccagttcattcttatctaaatttgaaacaatgtttctatgttgacaacaacctggagatttttttggattaaattctcctgatccccattccccaaatctctgaggaggataaattacttttgaaatggcaagttaggccattgactaatagcaaataataacatgttctgcttagtgtggacaattttaactttgaagctgtaagggaaatatttttttagaaattttctacaagaatgggaaactggccaagcacagtgactcactcctgtaatctcagcattttgggaggccaaggcaagaggatcacttgagcccaggggttcaagaccagcctggagaagatggtgaaaccctgtctctacaaaaaaaaatttttttaattagccaagcatgatggctcgcacctatagttccagctacttgagaggctgagacaggaggatcccttgagcccaggatggatcccttgaggatgcagtgagctgtgattgtgccactgcatcccacccagactgagcaaaagagtgtgacccatctctttttttttgagatggagtgtcgctctatcacccaggctggagtgcagtggcgcaatctcggctcaccacaacctctgcctcctgggttccagccattctcctgcctcagcctcctgagtagctgggttacaggtgtgcgccaccacacctggctcatttttgtattttgagtagagacacggtttcaccatgttggccaggctggtcttgaactcctgacctcgtgacccacccaccctgaggtgctgggattacaggcgtgagccactgtgctcccaaagtgctgggattacaggcgtgagccactgtgcccggccatgtgaccccatctcttaaaaaaaaaaaaaaagaagaatgggaaactgaaatatgtacacataaatatagtagtttcttatttagcattattcttttattgatcaaaaccaggagtcaaagagccagatactaaatgtcttagactttgaggtcacatgatattcttcattttgtttatgatcatcaaaattataaattataaaatttataaaattataaaaaccattctcaggaaagaggctgtataataatcaggttgaaaccagatttggcctatgggccggagtttgttgacccttgatcttctaaaaatctctattactattttaggataaaaaatatatataagtaatttggtagtttataaaaactaccgcatatgagatagtcagaaacttgcaagtttaactgaaaataagaacattctgggagaaaacaggattttgaaattagtattattaataaaaagaagagaaccaacattcattaacatttaataaggaccagtgattgggcatcactggaatgtagctatctcatttaagcctaaacaatagctatgtgaaataaatattaagatttcctcttgtatggccaaaatagggatttccaaaatgttctgggtaggataatttttttcccaatttttttttcggctttttccccttaggccttgacatcagtagttgtggcgaagtcttagttccataatggaattacttaagcccttggaggagtagagataatcctgtatctctgggtctagttgagaccttctagaggctctgctcttggaaacaaacctccaagatcccagatgagcaagtttatacctgcatgtatattgtttgcctggaaatagagtcagcatgtgcaccaaagttgaatgccatttgttaactgacactgagatgagtctaggaagtcaaaatatataaacagtgatgtaaaattgacaatgatataaccattcttaatgaatgtgtgtatacatccacactcgttttctgaaaatcccaaaactattttggatttttaaactcttgcttttttagttagattttctatatttgaaaaataatttttaaattcactaatcagggatgcatagtacttgcatccacactcgttttctgaaaattccaaaattattttgggtttttaaaacttgcttttttagttagtttttctatatttgaaaagtcattttttaattcactaatcagagattcatagtacttgtttatgatagttaaaatgtgtctagagggccaggcgtggtggcttacgcctgtaatcccagcactttgggaggccgaggcgggtggatcatgacatggtcaggagatcgagaccatcctggctaacatggtgaaaccccgtctctacaaaaaaatacaaaaaattagccaggcgtggtggtgggcacctgtagtcccagctactcgggaggctgaggcaggagaatggcgtgaacccaggaggcggcgcttgcagtgagccgagatcgcgtcactgcactccagcctgggcgacagggcgagactccgttcaaaagaaaaaaaaaggtgtctagagtcaggtgttctgatgtgtaacaaatatcctattttgcatttcctggttctgaaatttatctatgtttcctttttaccagattgccccagaccatgtagttccagctccagaagagtgctatgtgtatagtccattgggctctgcttataaacttcaaagttacactgaaggatacggtaaaaacaccagtttagtaaccatgtgagtgaaactgctttttggagcatgacttaaactgtatatggatgaaaattactggttttttaaatttttgtctcaattaaaatgtttgaagagtgaaactccatttttttactgctattactctgtgttttcagttttatgatttggaataccatgatgggaacatctatactaagcattccttggggcataaaacaggtaatactaatttttcagcacactttttgcctaaatgtttttctctttatattgtaagttttataacagaggttttaataaatctacataaaattcattaaagaaaatagatggttatatttagtttttcatgagttgtcaagtttttatcatgattgtttagggtaaaataattgcatatgaatttatgcttacatgatgatatatgctgttttatacttttatttttaaacaggctggatttactactggaatgtgtgtcatcatactgatgggccttttaacactttattgctgctacagagtagtgaaatcacggactatgatgtgtaagaatttgacacagtgacaatagattatgggtattaataagcatttccctttgaggcagatcactagtgtgtatatgctacatgtgtgtcagctgtctactttgtacctaaagatttacttctgtaattcatcgctttcagctaaattgatttgctaataatatttagtggctgcttttgaaattcagagaagctgggagttatttgcagagtgcattcactttggtgctagtttcttcataagaatcatttaaaaactcatatttataaaataatgtctttgccaaaactaaattgagaattctgtgcttcctgtcagttaatggtgacttgttttgacctattcataccaaaagatctaaatgttagaatctgctaaaagtagaaattataactagaaaaatatgaaaatgtaagcaactccctagtaatgaatatttgaagttgtgtgaacaccttacctctactcgtatctacaaattctggatcagggaaatatcttttttaggttgttttaaagtagtctaggacctaaacaaacatgcattatttcattaaatcttagcaagtatgaatcaacaggccagactttgcctccagtttttttctgtgcctactaagcagcttccttctttatgttaaccagatctcctattagtcactgggcaagtatttgtttaaaagtcttgagaagccagacctggtggtgtgtgtctgtagccctagcaactcaggaggcataggtgggaagatcactttagcccaggagtttggggccagccttggcactgtagcaatacttcatcttaaaaaataaaaaataaataaaaaataaaaaagtcttgagagaagattcattctggtttctaaatggtaagaggagataattttagcctctggtttctaaggcaaattgtggctgaacttggaagacttctttaaatgtatacagtaagttcatgtcttatctaattcagcatctcatttaaaattggaacagagcccccacagagttctctctataactgttttttcttttattttccttttttttggagacaggatctcactgtcacccaggctggaatgcagcagcgctatcacagctcactgctgcctggacttcccgggcacaggtgattctcccacctcagcctcccaggtagctgggactacaggtgcataccaccatgcccagttaattttttgtatttttcatagagacagggtttcaccatgttgctcaagttggtctcgaactactgggctcaagtgatctgctcacctctgcctcccaaaatgctgggattattggctctataactgttaacttccatgttattaaactactccacaccatttaaaaagaagagaggctgaggcacgagaattgcttgaacccaggaagtggagcttgcagtgagccaagattgtgccactgcacttcagcctgggtgatggagtgaaacactgtcttaaaataaaataaaataaaataaaaataataaaaagaagaacttccaccaattcattttacaaagtccacacacccctaacacaaagcctgacactaccaaaaagaaagaaaataatatagaaacgtaaaatttatttgtaaaacattatcatatagaatccaacagtatatcaaaacaatatcctgtgcctaagataaggtttattccagtaatgcaaggatgtttcattattaagaaatccaacataattcactacattaacaaattaaagaaaaattcataattacatcaatagatatcaaaaaggcacttaatagaattcagcacctgtttctgattaaaactctaagtgaaaagcactacttaaaaatagcaaagtctatttattcccagacaagtaccggcaccattctaaaattatgaaatgctaaagcagttttcattaaagtcaagaaaacatagaaatattcataattaatcaggttttttttggagatattgtcaaatgcagcaaaaaaaaaccctaaataatataaaaactagaagagacttagaattatattatcagtcaaaagataattttattagaaatgctaagagtcactcagctcaatgcaacctcctcctcccaggttcaagcaattctcatgcctcagcctcccgagtagctgggactacaggcgcccaccaccacgcctggttaatttttgtattttttgtatttttattttttttgagacggagtctcactctgtcacccaggctggagtgcagtggcgcgatctcagcttactgcaaacttggcctcccaggttcacgccattctcctgcctcagcctcccgagtagctggaactacaggcacccaccaccacgcccggctaattttttgtatttttagtagagacgaggatttcactgtggtctcgatctcctgacttcgtgatccatctgcctcggcctcccaaagtgctgggattacaggcgtgagccactgtgcctggcaatttttgtattttttgtagagatggtgtttcgccatgttggccaggctggtctcgaacttctgacctcaagttgatccacctgcctcagcctcccgaagtgctgggattacaggcatgagccaccgtgcccagccgaaacagttattcttgatagtgatattgtcctcatgttctttatctagatgtgaattctcatattctaatgtccccaacttttcaggcttatgactgctttctgccatgtactagctgccatattttgcttcaaaggtggcagaacttcagtttttctgtattcatcaaacataattatttcaaagtagttcaaagcatgggatcatagaggaaaaaagactgtaaaattatcctttgatgacaattaaaatactctttcataggttatacttatctatattctttcttgaacattgaaatgtaaaacaaaaagtttatattactaatataataatcctatcatggaaaagcaaatggttttagttttttgttttcttatgtaaatttctatcctaaatgataggaatctctaaatacatgctttttaaagttaatcatattgtattttagttgtcttctactttatcacctattttttagtacatgttatgtttctacgatcaccatttgtgtctcttaatgattgtatacagttgcacacggcagctctattgtatttgcataatcattgccctaggtcttatgttaaagtcattgctagtttttgctattctaaagaatactcttctaaaaatattttatatatactttctgtattcttttaaattactttctttttggtgcagtggtgggatcatggttcactgcagcctcaacctcctggtctcaagggatcctcccacctcagcctcctgagtagctggtactacaggtgcacgctgtcacgcctggctaatttttgtatttttttaaatatggggttttgccatgttgctcaggctggtctccaactcttaggcttaagcattctgcccacctcagcctcccaaagtgctaggattacagacctgagccaccatgcccagccctgtttgtctttttcattgtaatttgtttcttcggttgctagaagataaactttcatgttctatttctacattatgttttctaacttttttattatttgatttctttcttttgttttttttctttttttttttttgagatggagtctcactttgtcatctaggctggagtgcagtggcatgatctcagctcattgcaacctctgcctcccaggttcaaacaattctcatgcctcagcctccagagtagctgggactacaggcgcgccactatgcccagctaatttttttgtattttttgatagatatggggtttcaccatgttggccaggctgatctcaaactcctgacctcaagtgatctgcgtgcctcggcctcccaacgtgctgggattacagacatgagctgtcgtgcccggcctgtttgactcaattttctgaaatttatattggcatgtggtagaaagtgtgactcaagaaactttccgcaatgttgttatctgaatatgccaaatattaagtaatattttctggcccttactgatgcatttgtctaaccttagtttatcacttgcttttatgaattataaaatgttatgatactataatctgtttctcaggttatctgtactattttatctacatttcttttatttttctataatgttttaattttattatcttataatatattctaatgtctagcgatagaatacccataatctttcgccaaatattttgagtttatttggggaacacaaattatgaatatggaatatatgttcaacatttagttttattctttctcttattttatctagtttcgttggataccactagctgggaatatccagatgtctgcagacattatttcggctcctttgggcagtggtcgagtctccttttctccttggtgtctctcattggagcaatgatagtttattgggtgcttatgtcaaattttctttttaatactggaaagtttatttttagtaagtatctatatcatatgcttttaacacagtactttcaaatactattaccactgtaatgttagttctagccttaaattctaggacttgggataaataaaataagaagtaacatatataattttggaaaatatattttattcagttggctttctgtggttgtgctctcaaatatagtgtatgcttatttccaaacattaatctttgaaggaataatattcctccaaaatctttagttaaaataaaatatgtctataatccaacagatcttttaagtttgtttcactaaagaatttggtatgtagactctagggaaaacaaatttcagccacttattttcaacatgttaggatataagattaggaagtcaaagaataatggaatttatgtgataaatatattattaatatttacatatcacagaattataatttacccaaatcagctacttaaattctgaggagagtcttagaaatcagtccaaatacttcttataattttttttaggttagatagaggaagttcatttttttaattaatgaatttttttttctttttttgagacagggccttgctatgttgccctggctggtctcaaactcctgggctcaagtgatcctcccacctcagcctcctggttacagactcacgccactgtaccgagctggaagtttattgtaaaagataccaaacctttttctgtataaaggttttactaaagttttcactaaacctaaagtttaatatatgtttagcagctttaaataaagcatatatttaaaatctggatttacgtgaaaaccaaatttcaaagtaagtcctaacataatcacaacagctaatttccctaagagcctttgaatgagggagataaattctatttcattttaaacattaaagaataaaattagctttataatttttattgccaagcatttttattttttgagaggttttttggagacagagtcttgctctgtcacccaggctggagtgctgtggcgcgatctcggatcactgcaacatccacctcccaggttcaagtgattctcctgcttcggccttccgagtagctgggattacaggcacccgcggtaacactcagctaatttttgtatttttagagatggggttttaccatgttggccaggctgttctcgatctcctgacctcaagtgatcctcccacctcggcctcccaaagtgctgggattacaggcatgagccaccgcacctggccccaagcatctttattgtttaaaaaactatgaaatatttcaaactacaaaaaatgcaaaagctaatataaataccagtatactgactaatgagtttttgtgtctcattttgtcatatttttattagatctccttttttttttttttttttttttttttgtagagacagagtatcagtatgttgcccagactagtttctacctcctggcctcaagcgattctcccacctcagcttgctaagaggcttgaattataggcacaggccaggcacggtggcccacgcctgtaatcgcagcactttgggaggacgaggctggtggaacatctgaactcaggagttcaagaccagcccggccaacatggtgaaaccctgtgtctactaaaaatacaaaaattagctgggtgtggtggcacatgcctataatcccagctactcgggagcctgaggcatgagaatctcttgaacctgggaggcagaggttgcagtgactgagattgcaccactgcactccagcctgggcaacagagcaagactctatctcagaaaaaaaaaaaaaagaattatagacacaagccactatgcttaggtagttctgtattcctataaaaagaaaatattatggatagagtggaagccccacatgcactccttctcaatctcattttccttctctgaatttggtgtttatcaatcccatgcactttttggacttttactacatgaatatatgagcaacatacactatttgttttgcattttttttttttggtttttttttgtttttttgagacggagtcttgctctgtcaccaggctggagtgcagtggtgagatctcggctcactgcaatctctgcctcccaggttcaagcgattctcctgcctcagcctcctgagtagcggagatcataggcgtgcaccaccacacccagctaatttttgtatttttagtagagacaaattttcaccatgttggccaggatggtctcgatctcctgacgtcgtgatccgcccacctcagcctcccaaagtgctgggattacaggtgtgagccatggcacctggccgcttgtttttaatctacataaacgcttttgcaacttgctttctgtctttcatcatctctgttaatacacaaagttcattctgattgcttatagtatttagtaatatgaatatacaacttttttatctgttctcgttgataaacatttaatttgttttcacttattgtgctattacaagcaaggctttattaaacatccttatttctgttgccttgtatacatgggggagaatttctccaagttatggaccttatagacacatttctggaatttaagatattcacattttcaaccttacttgaaattgcagaattgttctttatcatgcttgtactacttacactcctgccaacagtttatgaaagttacccttgttccacatcctcactcacactcagtattatcagacttaaattttgccatcaggatgtggttttaatttgcatttctcctcataaggagtggcattaatcatcttttcttaattatattgaccattaaatagcttattcatatcctttgcccatttttctatcgggttgttggtccttttcttacctataggaactctgtaaagttcggatactaaccatttatccattattgtgttgcaaatatcttctaattagtggcttgtcttctctttttatatggtagctctgtgttattcaaaagttttttattttaaaattagtgtttttctccattatgattcacaactcttccatatacattttagaatcaactaatcaagttccacaaaattccaatcagaacttgactggaattgcattgattttatcagttggtacaccgtatagtaattgatattgtagcgtattgggttagaatttgattgacattgcactggatttattgatgtggagagaattgatatcatttagatactgagtcttcctttttttttttttttttttttttttgagacggagtcttgctctgtcacccaggcttgagtgccggggcgagatctcggctcactgcaagctccgcctgctgggttcacgccattctcctgcctcagcctccccagcagctaggactacaggcgcccaccaccatgcctggctaatgtttttgtatttttagtagagacggagtttcaccgtgttagccaggatggtctggatctcctgacctcatgatccgcccacctcggcctcccaaagtgctgggattacaggcgtgagccactgcgctcggcctagatactgagtcttcctactcatgactttggcatggcatagttctttgtttatttaggtctttaaaaaaaattttaagtttttcttgataaagatcttgtgtatctttttttttggactttttcctcgggatcttaacattttttctgtaacagtagttctaatatacaaatatgcagttttattataaaaaatctcaaacacatacaaaaaaacagaatagtataatttctccttacctagttttaacagttatcaacattccgtcatttttaaatcatctatagtagtgtttttcaaccattttttcattattgtcccttcaaggagccttttagatatttttttctgatcaccccccccatgaaattttaataccaaagatatactgtaaatctctttatgaactgtatgcatatatatgctttatctgtaggaagagtttctttcacaccctgagaatgaattttgtgcttcttgagagtaacatccattaagaagacataatccatgctattcccactccccacctagttcagctattagtatatgtatagttcttcttttagatagaatttattcattgaaataaacaagtcttaattatacatacatacatctatacacctccttcaagaaatagaacatttccatcttcccagaaagtaatgataaatttttgattatacattcaaattatttgttgctgttataaaagaacctaattacattttgaatgtttttttgagacagagtttcactctttcacccaggctctggggtgcagtggtgtgatcacaactcactgcagccttgacctctccaggctcaggtgatcctctcacctcagcctcccgagtagctgagactacaggcaaataccaccaccatacctggctaatttttatattttttgtagagacaggtttcgtcatgttgcccaggctggtcttgaactcctgagttcaagcagtctgcccgccttggcctcccaaagtgctgggattacaggcgtgacccaccgtgccctgccccttgaatgtttatctttaatctagcaaacttgctgaactcttactgattctaaaaattttgtagccgggcgtggtggctcatgcctgtaatcccagcactttgggaggccaaggcgggcagatcacgaggtcaggagaccgagaccatcttggcgaacacggtgaaaccctgtctctactaaaagtacacaaaaattagccgggcatggtggcgggtgcctgtagtcccagctacttgggaggctgaggcaggagaatggcatgaacctggggggcggagcttgcagtgagcggagaccgtgccactgcactccagcctgggcaacagagctagactctgtctcaaaaaaaataaaaaaataaaaaataaaaattttgtagatgcactttgtgtttcctttttaaataatcatatcatctgtgaattaaaaaagctttctgtttgggcttagtggctcacgcctgtaatctcagcactttgggaggccaaggcaggtggatcacctgaggtcaggagtttcagatcagcctggccaacatagtgaaaccccgtctctactaaaagtacaaaaattagccaggcgtggtggtgggcacctgtaatcactgctactcaggaggctgaggcaggagaatggcttgaacccaggaggtggaggttgcagtgagccaagatcgtgccactgcactcaagcctgggcaacaagagtgagactccatctcaaatcaaaataaaataaaaaaaaaaacctttccagtttttttaatagttcatatatgtatacatacatttatatttatatacgtatgtaattatatatacgtacacagacatatacgtataaatgtgtatctatatgtatatattgatggttttttttttagtgtgaagttgcattgaagcggtgcttgtagatatccttatattgttcataaggaaatctttctgatgtttcacaaatattatgtttattgtgggatatcagttgtaccctttaataatttaaagacattcccgcctattgtctacttaagtatttttattaaagtggttgaattttatcaagtatttattctgcatctcgagataatcaaaagatatgaagagacaatcaagagattatcttaattaaatttcctcctttatcaatatgatgaattaaatgaatactttttgtaaaatttaaaccatccttgtattgtggggtaaacttaaataagttcattagtcatgacatatttttcaaatgccttactggattgaatttgcttttttggaggggtaggagctaatatttgtttagatcttttgtgtcttttcctaacaaatattggcctatggtttttctttttcatgctgtccatgaaccttggtgtgttagtttcccaagggtgcagtaacaaattaccataaatatgcttacaacaacacagatttcttctttcataactatggagactagagatgtgaaatcaaagggtgaacagggccctggtccctcctaaggctctaaggaagaatccttccttgcctcttcctaacctttgttggttgctggtggtccttggcattccttggcaagtaggtacatcactccagtttctccctccatcttcacatggccttcttccctttgtgtgtctgtgtccaaatttccctcttcctataaattgggctgggcgcggtggtttatgcctgtaatcccagcactctgggaggccaaggcaggcagatcacctgaggtcaggagtttgagaccagcctggccaacatggtgaaaccctgtctctactaaaaatacaaaaattcagtgggtgtggtggcaggcacctgtaatcccagctactcgggaggctgaggcaggagaatttcttgaacctgggaggtggaggttgcagtcatgcgactctaccccagcctgggtgacagcaagattctgtctcaaaaaaattaaaataaaataaaataaaagacatcagtcattggctttagggcccaccctaatctattatgacctcatcttaacttgattgtatctacaaagactctatttttaaataaggtcacattctgaggtttctagtggacataaatttggggtaaggggaatgctatttaacccagtacacttcgtgtcaagattttactagccttactgtaagtctttggcatcaagaaattacacaaagattcataaattccaatcttaaatcataaacaacctttggagatattataaaaacccaaagtactatactgtttcttttattctatcttgagaaacatacggtgaagatgaataatttaactatttaacttacttttatgaccttaaaacctaacccagcaccttttactatcttattcaagtttcacaacaaatacttttattaatgcttactcaggttatagaaggttaatatcaaacagaataaagtaaaccccctgaggcaagtaaacacattctctgcctgttctctctttcactgtagaatgatgaatgctcagccatctgcatgtgctttgttctttgttacttcctttagtctaactcagtggttcttatgtaaataacaattcgtatatggccttagatctataaaagtatgtattgtactttgtaaaaaaaaaaaaaactttgattttccaggtaagatcagctgtgtatgagtgttggtttcccctttttgcacactttagaactgtactctgtgtgaaatataactttagtgtgaggataagagaaaacttacatacatatctttattccggggctttaaactatcattaattcagtgttgtggatagatttttttgaaatcttcaatttacacgtaaagattttccacagtggaactgtgaagacactaacattatcatgcccataagtgaagaaaactatagaaggtgaagctatgttaacagtgaagtagtctttgttcagtgtactagattactacacagatattaaaagatttttataggctgggcccggtgactgactttgggaggccgaggtgggtggatcacgaagtcaggagatcgagaccatcctggctaacacggtgaaacctgtttctactaaaaaaatacaaaaaattagccaggggtggtggtgggcgcttgtagtcccagctactcgggaggctgaggcaggagaatggcgtgaatctgggaggcggagcttgcagtaagccaagatcgtgccactgcactctagcctgggcaacagagcaagactccgtctcaaagaaagaaaaaaaaaagatttttataaataaaagaccttaaagggtaatagatttagtgtctttcattcagtgttaaactatattttttcctttatttttagattttattcatcacattaatgacacagacactatactgagtaccaataatagcaaccctggtaagtagtttgggatgttgtttgtttctttactctccaccttgctccaaaaaggatttaaggtagaacatgtgaccttattttaggtaaacgattagtagaaaattattatgtttactgagctgctactaaattgttggtagtgtgtttaaaaaaaaaagaacctccaaaaaggctgtgttaatgtaaccaagcaataggttgtattaatgtgagctaggcaacatttagttcatattatacaattcacaattttatctacagtatccatatttgcctgtgaataatcagtattttcaagaatctatatcactattaattatatcagatgtctagaagcatagttctcagtttaacttagttttagaggtctattgttttagttattaatatatatgctatacaaatttgtaacctgtaaaagaattcattttctagtaataaacagaggttagtaactaaatatggaaaaataaattgaagctttttcaatttatttattaatacaaccaagcaataggttgtattaatgtgagctaggcaacatttagttcatattatacaattcacaattttatctacagtatccatatttgcctgtgaataatcagtattttcaagaacctatatcactattaattatatcagatgtctagaagcatagttctcagtttaacttagttttagagatctattgttttagttattaatatataggctatacaaatttgtaacctgtaaaagaaattaatttcttagaaatttttctttatttttaaaaaataaacccttgtgagccaatgagtttaatccagtatggccgttacagggaaagtgaatataaacattaatataactttggtaacagttatgctgttaaacttgaacatcacctaaagctttatgtatttagatttcagggatactaaactgatgtcatgttgatggagatgcacattgatcactaagaggatgattcattaaacacatttattaagcctactatgtgtcaggaactgttctaggctctagggatataataatgaacagacaaaagtccctcctctcatgaagtttacattccagtgtttgctactcagtgtcttacttttccccctaattaaacctgtcttttgttaatgctagaaaatgagtgagtaaagtactagcttttattcctgtggacacatacacatatacctttgaattattatcctaaaatctcttgtgccctattccttacttcagaattttcaaaggatcaaataacatccttgtatttaaagagaaaattattttactatacctattctgatattaattgatgaaactagtttactaatatctaaagttaatagtacttctccagtagggagtcagttcatcattagggtaataaatattaatatcacagtcacattgatgatttagagaaccccatcagcaaagtcagtttatatagtgatatcttatatccagcacttcttgatttctctgctaatgtttattttgaacagtgtagtaaacaatgagagtatgaaacaatccatttcagttagtgtaaaaaattttagctgctgagcatggtggctcacgcttttgattctaacactttgggaggccgaggcaggaggattgcttgagcccaggagtttgagatcagcctgggcaacatagcaagaccctgtctctacaaaaaaaaatttttaattagctggccatagtggcgtgcacctgtagtccgagctactcgggaggctgaggcaagaggatcacttgagcctgaggggttgaggctacagtgagccatagttacgccactgccctccagcctgagtgagtgagatcctgtctcaaaaaaaaaattacagctaacatttattgaatgttaacatttattgaatgcctgtgtgcaggcattgcattaaatgttttatagcaaccttaaatggtagatactgtcaacaccattttccaggtgaagagaccagggaacatagaagttaatttcatccaaggacacctaaatattaagtggcagagttgggattcattattcagtcaattaacttccatccacagcctgtgctcttttttttttttttatttgagacaagatctctctctgctgcctaggctggcctatagtggcaatgatcatagctcactgcaacctggtacttctgggtttcagcaatcctcccacctccacctcccgagtagctggaactacatcccatccagcaaaattttgttattcttttagagacagggttgccatgttttctaggctagtctcaaactcttggcctcaagtgatcctcctgccccagcctcccaaagtgctgggattaaaggaatgagccactgcgcccagctgccatagcctgtgcttttaaccactataattagcacaagaaaatttctgtctagagcgtagaagaaaaaaagcacactaaaatgttgactaagaaggagaaagaaaattaaatgtttggctttgtggcatgccaaataatggatagagaataaaattaaaaatagaactgacaatgaatattctttctctttgacaaatgatgagcataagggttacttaatacgagtattttctacctgcattaagagttctttacgaaaagctgattattagcaaaagctctactgtgacattagaaacaatgagaatggctggtactctgtctgataacagaagaaattgccacttgtagatcagtatttaagaaacatacgtttaggcccagtgcggtggctcaggcctataatcccagcactttgggaggccaaggcgggcagatcacgaggtcaagagttcgtgaccagcctggccagcatggtgaaaccccgtctctactaaaaatacaaaaattagccgggcatggtggcatgcgcctgtaatcctagctactcaggaggctgaggtaggagaatcacttgaccccaggaggcagaggttgcagtgagccgagatcgcaccactgcactccagcctgggtgacagagcgagactccatctcaaaaaaaaaaaagaaacatacattttactgatttcccagtcatctggataccatctggactcttaggcttctatcaaatatgatcaacttccagaattattttggattgttgggattcaagattcttgcatttttatcagtgattatgatatcatggcagctgtttcaatgatgtttgctttttattccaaacccatagattttgtttgttgttaaaagaaatctgctctttggcctttttatgggttattcgtgtgataaacagtcaccctaaatgatattttttatattattgtgtaaataagaccaaataccatccagcccagtattttctctctggcaatggaaccaagggatatttggtgggatatttttatagtttccagtagagtttaaagataatatctcagggctgggcgcagtagctaacgcctgtaatgccagcactttgagaagccaaggtgggtggatcacctcaggtcaggagtttgagaccagcctgaccaacatggtaaaatgccctctctactaaaaatacaaaaattagctgggcatggtgatgtgcgcctgtagttccagctacttgggaggctgcaacaagagaatcgcttgaatccaggaggcggaggttgcagtgagccgagatcacgccactgtactccagcctgggcgacagagcgagactctgtctcagaaaataaataaataaaaataatgataatatctcagaaattttaaagattccctcacccttatttatttttaggtgaaagagtcctaatattcctaaaattaaccctctattttttccagaaaagagaaatttaggctcctaggaagagttgaggttggtagagcaagtgtctgtctctagaggcagtcattttctgttttttgttttgttttgttttgttttttgtcatcttctttaatctggtgctttcctattgcagtgatttgtccaagtgccgggagtggaggccatcctgacaacagctctatgattttctatgccaatgacacaggagcccaacagtttgaaaagtggtgggataagtccaggacagtccccttttatcttgtagggctcctcctcccactgctcaatttcaagtctccttcatttttttcaaaatttaatatcctaggtaagtagtagcactgaattatggagactttgtgtaatagaatacgtggtggagtctagggaaatatggtctgattggggagttaccttccaagcctgttcatctgtgtttaatttgttcattcgtttttgttttgttctttctttctttcttttttttttttttttttttgagacggagtttcactgttgttgcccagggtggagtgcaatggctcaatcttggctcactgcaacctctgcttccggggttcaagcaattcttggcctcagcctcccaagtagctgggattacaggtatgcgccaccacacccagctaattttgtatttttggtagaggtgggatttcaccatgttgtccaggctggtctcaaacccctgaccttaggtgatcgacctgcctcagcctcccaaagtgctgggattacaggtgtgagccagcacgcccggcaatttgttcattcttatgataacctgattttttctatttttttttatggagtttggcatggagaaaagtgtagatgaccatttttggttttgttgtgtgtgtgttttttttttttttgagacatgaattatttggtttctcattctaaacttactgaacaattcttcctcattttctctgaggatacaactagacgaaatacacgaaaatttcaggaggagagatccaaattggatattataggaattcttgattctaacggttggaaacagaacttactaaggaaagttatagaatgttttttcctacagtctctaagagtattgtgcagaattgtcacctgactttgaacctgggaaatcattctctatctcaggcttcgtaggtttattttgcttttgctctcttcctcagtgcttttttttcttagaacgctattgccttcttcaaggaacagacctctttctgtgagccctgcttttcagaaaccactaaacgaatgtttttactccacttaagatggcaaaaggggccaggtgtggtggctcacgcctgtattcccaacactttgggaggctgacgcaggtggatcacgaggtcaggagttcaagaccagcttggccaagatggtgaaaccctgtctctactaaaaatagaaaaattagccgggcgtggtggctggtgcctgtaatcccagctacttgggaggctgaggcagagaattgcttgaacctgggaggtggaggttgcagtgagccaagattatgccactgcactccagcctgggtgacagaacgagactctgtcttaaaaaaaaaaaaaaaaaaaaaaaaaaaatggcaaaaggaacctccccatttgaaagttcagatctggctaaccaaggacaaggatatcattcataaggaatcgataattccacataaaccatacgatttcacttcctccctgtggatgtgatctctggcaggcagtctagagcataaaatagataggctgggtgcggtagctcatgcctgtaatcccagcactttgggaagctgaggcaggcagatcacctgaggtcaggagttcgagaccaaactgaccaacatggagcaaccctgtctctactaaaaatacaaaattagccaggcatggtggtgcatgcctgtaatcccagctactcgggaggctgaggcaggagaactgcttaaacccaggaggcggaggttgcagtgagccgagatcatgccattgcactccagcgtgggcaacaagagcgaaaactctgtctcaacaaataaataaataaataacccagcatatcaaggaacaaggcagtggcttctaggtttccagaagaccaaaggaaaagttaaaattatttctctttgcctgtctgcctcaggaacaggattcactgtaagctgccatagacacacagaagatgaagagttgtggttatataagctctggcgtcctgttttcatcctttctgaatcagctaatctccaaacccacagtactgcttatatcgctcattcgtggtttcctgatttgcttgccaacttttctgtgaaacagatcttttaaaagaatataaacttatagaaggatttgctcaattgggcacaacaatcaccagacttccaaccaggttgattgttcattcttcagctccttaaggatattctgcttttgttcttttccttggtactttccctttctcttaaaaccatagcttcattagaggaattagcatctaaggccttcctgaattttctgactctactccataatgactagacttaatttcttaaaaggaataatcttctaccttctacactactaaaatattctgaatgcccattttaccttgtatataatacctgagaatggagtctggaatctctgtctagcaagtagtgctacccagtcaaaacctcatctagatactagatcaggattgttcatgtatttggcttctcacctttctcaaatatgcttttgatccacattcactgcttttctttctttaccctcttaccatctcacattaaatactgtgacagactgactctaacacttccaattcaaagaataaaagtaagtttcatgttgtttttttcaatcctatgtaatcctataattttgtaatggactctctgcttgtatcttctgcttaaactcaactcataagtaaatgaagcagttttgcattcagcattgtatgagctaccttcatctgattcttcctttcttattcttttttttttcctttgagatggagtctcgctctgttgcccaggctggagtgcagtggtgcaatcttggctcactgcaaactctgcttcccgaattcaagtgattctcctgtctcagcctcctgagtagctgtgattataggcgtgtgccaccacacctggctaacttttgtatttttagtagagatgaagtttcgccatgttggccagtttggtctcgaactcctgacctcaggtggtctgcccacctcagcctcccaaagtgctaggattacaggtgtgagccaccatgcccagctcatctggttcttcttaggcctactacatagagtgtttttgttttttttctggtaactccctcagcttgtttctagtctttagatcccagctgggtgttagtggagataatcaatgcagttaacagtttcccacactttgctgagactatggaaacaatgcttgattttaaaataatctgtaaaacacacaaagataataaatggtttctgaattttttcctcacaggcacagtgtctgtcctttatttgattttccttgtcacctttaaggctgttcgcttgggatttcatttggaatttcattggtttataccaacagaattttttgtaccaggtgagctttttggcaaaataataaattataataatgtgatcttaaccattgtcatatgctattctaaaacaagtaatgattttttttttatgctgagcatttttataaatgctattaagttaaaaacaggactacagttgagattattttggatttcctgcagttagtggtaaccagggccctttgtcatttctacttgttagttgaaattcatttaagttatagtgcactaatacttgaattttctgtgtttttcatctagcctttcttatgggtatataatgtgctattacattgtggttttgtggtttttaattaaacatttttattgacatataatagttgtacatatttggggggaacatatgatattttaatacctctatgcaatgtgtagtgctcaaatcagggtaattgggatatccatcacctcaaacatttatctttttgttgggaacgtacaatgtggttttaatttgcatttctgtaatgatcagtggagttagcaacttttcatatgtttgttggccatttggatttcatcttttctgaagtgcttcttctgtttttctatttaactgtctgtttttttcatactgatttataggagttctttacacattccaaatatgaatcctttctcaaatacatgtaatgcaattatcttcttcctgcttacatcctttcttgatatgccttttcaaaggaataaagtaagcagtttgaaaatgatgagaagtttggagcttctttaaaaccattttgtgaaggagtctgttatttaatgtattatgtaataatcatggtgtaaatgtctatgttctttaaaaaagtgtattttccacacaaaaacttgtacatgcatgtttatagcagcattattcataatagccaaaaatagaaacagcccaatgtctatcaataacaaatggataaataaaatgtggtatatctttcttttttcttttgagacagagtctcactgtgtcacccaggctcgagtgcagtggcacagtctcaactcactgcaccttccccctcccaggttcaagtgattctcctgcctcagcctcctgagtagctgggattacaggcacgcaccaccatgcccggctaattttgtatttttagtagagacagggtttcaccatgttggccaggctggtctcaaactcctgacctcaggtgatccacctgcctcagcctcccaaagtgctgggattacaggtgtgagccaccacacccggccaaaatgtggtatatctgtacaatgggatattatttggcaatagaaaaggaatgaagtgctgtggttatggttgtacaactctgtgaatatgctattcagttaaaaactagttgtacacttcaagtaggtgaaacatgaattttatttcaatagtgctattaaaaagaatctcaggttttcaagaaattttctcaaaaagatagcttttgttagttaatgggaaaaagctgactatttacccactgtaatatgacaagttagaaacctaacagtggtcttacttgccttaattagaaaagatagaaaaggattagctaacaaattgctttacagggtatcttaactaagtaacagaattgattactctgagagacaggaaattcagctaaattgaaaagaacgtgttgaaaactaatagatcttattttatttagatttgtttattttattttagagctagtgcttgattcttgttttctcttcttttcctaaaataatatagcagagtcagtggactttttatacgtttctactttttacactaaggaatcctctgagatgggtttggctagaccagcagtattttcaagtaaatcatggttttattctacataaaatcattttttttctttctattagcagtcaaaacagaaattggcagtgcttttgcaatgttattttattctcactttaaagcagctttgtgtttattgcagaacatttagagattataggtaagtggttaatttaaaataaattgcaaaaaaaaataaaaaataaaataaaataaaataaattgcataacctgacataaccactatttatatttttgtggataccccctcaccagtcttttttctttgcatacacacatctatatacacacatatattttaaaaataaaagtaggccaggcacaatggctcatgtctgtaatcccagcactttgggaggctgtggtgggaggattacttgagttcaagaccagcctggacaacatggtgagaccctgtttctacaaaaaaataattcttttaaacttagctgggtgtggtggcatgcacctataatcctagttaccagggaagctgagataggaatatcacttgagcccagaaagttggggctgtagtcagctgtgtttgtgccactgcattccagcctgggtgacagagtgagaccctatctcaaaaagaataaaacaataaaaagtaaaatcacagtatgtatgctatttcaatcatagggaaaaaaagaaactgcctccacaacataatttttgataccatataccactgcacaactgtatctcaatttaatgaatcctctgtaggtggacacttatttctaatatttttacataatgttttttagatttgtcagtgaagaatgttaaatgaccagtttgccctttcataattccttttctagaggtacttttctggcaaattcaggtattaaaaaaatgaaggactttaaagtcagacagaccctaaatttgaatcctgcccttctccataccagttgtatgacctcaaataggaataattgatataaagcacctgcacagagtatacttttttttttgagatggagtctcgctctttcacccaggctgcagtgcaatggcgtgatctcggcttactacaacctctgccttctaggtttaagcgattcccctgcctcagcctcccaagtagctgggattacaggcttccaccaccacgctaatttttgtatttttagtaaagacaaggtttcgccatgttggccaggctggtctcaaactccttacctcaggtgatccgcccaccttggcctcccaaaatgttaggattacaggtgtgagccaccacactcagccagagcatacctttttctcccccttttgagtgcttcgcccaagtataatgctggcctcgaggaactttgtaaagacattttaatattcttattccctggataaaacagtgatgactgatttttagtagtcaacttttggctaccaatactcattttctaattgtcagttttaatgttcttgtttttatttttctcctagagataagatttcagtttccacagctgactggagtgcttacccttgctttttttattcataattgtatcatcacactcttgaagaacaacaagaaacaagaaaacaatgtgagtaattatctttggaattgacttttgtatctcccgaggataaattttttaagtcagtatttgaggcactttatatttagagtacaattaggcaattttgttacaagatcttaatttttaaacttaaaccatagagcagtcgtcagcaaatttttctgtaaaggttcagatgataaatatttcaggccttgtaggccttatggtttttgttgcagctccccaactgtgctgttatgttatgaaagcagccatagataatacataaacaaatgggtgatggcattgtttcaatgaaactgtttacaaaaacagacatcagacaagatttggcccatgagtcatagtttgccagtgcctgccatagagcaaccactgaaaaaatagaggtatggctaataagccattaatggtggtaaaatcttttaaagataccctgggcgtggtggctcaggcctgtaataccagcactttgggagtccgaggcaggaagatcacttgagcccaggaattcgagaccagcctgggcaacatggttagaccctgtctctacaaagaaaattagcctggtttggtagcacatgcctatagtcccagctacttgggaggctgaggcagcaggattgcttaagcccaggaagccaaggctgtggtgaactgtgttcatgccactgcactctagcccggtcaacagagcaaaaccccatcttaaaaaataaatgcggctgataaaaaatgatgagttcatgtcctttgtagggacatggatgaaattggaaatcaccgttctcagtaaactatcgcaaggacaaaaaaccaaacaccgcatgttctcactcatagatgggaattgaacaatgagaacacatggacacaggaaggggaacatcacactctggggactgttgtggggtggggggagtggggagggatagcattaggagatatacctaatgctaaatgatgagttaatgggtgcagcacaccagcatggcacatgtatacatatgtaactaatctgcatattgtgcacatgtaccctaaaacttaaagtataataataataatgcggctgggcatggtggctcacgcctgtaatcccagcacttcaggaggccaaggcgggtggacacgaggtcaagagttcaagaccagcctggccaagatggtgaaacgccgtctctactaaaaatacaaaaattagtcgggtatggtgttgggcgcctgtaatcccagcaactcaggaagctgaggcagagaattgcttgaactgggaggcagaggttgcagtgagccgagatagccactgcacttcagcctgggcaacagatccagactccatctcacaaaaacaaacaaacaaaaaatgcaactgatccaaaagaagccatggaaaagggaccaaagaatagatgtgacaaatagaaaacaaatagtgacaaatagaaaacaaatagcaacatagtagatttaaacccattgtattgataattacattaaaagactctgcagttaaaagattaaaagaggccaggtgtggtggctcacacctataatcccaccactttgagaggctgaggcaggtggataacttgaggccaggtgttcgagaccagcctggccaacatggtgaaaccctgtctctactaaaaatacaaaaattagccaggcatggtggtgcacacctgtcatcccagctactcaggaggctgaggcaggagaattacttgaacccaaggggtggaggttgcagtgagcagagatcgtgccactgcactccagcctgagcaacagagcaacactccatctcaaaaaataaataaataaataaaagagattttcagacttgttaaaaaacaaagcctaactatatgttgtctacaaggaatttatattaaacataaagatataccatgcaaatattaaacataagaaagctggagtggccaaattgatatcagatgaaatagactttagaactggcagtattgccagagataaagaggaactttacataatgatctgtagggatcagttcatcaagaagacataataatcctaaatgtatatgtacccagtgacagagcttcaaaataaatgaattaacaattgcaaaactgaaaagagaagtagacaaatccacaattataattggacgttttatcaccctccttcaagtaattgatagaacaaatagattaaaatcagtaagggtagaggaagcatgaaaaacactgtcaacctatttaatctaatatatatttataaagttttctctcaactgcggaatgcacattcttcttaaatacataagaacattttccaagatagaccatatgctgggtcataaaacaattctcaataaatttgaaaggatttaaatcatacagagtatgttctctaaccataatggagtgaagatacaaatcaataacagaaagaaatttgggaaattcacaaattgtggaaattgaacagcatactcttaaataaccaatgggtcaaagaagaaatcacaagaaaaattagaactactttgagtttatttaaagcagtgcttacagggaaatgtatagctgtaaacacctacactaaaaatgaagatctcaaaaacctaactttctaccttagacgatagaaaaagtaaagcaaactaaacccaaggcaaacagaagttaaccagttacttgttggcttgtctgcagattttgtgctcaatttaacagcttctgaccttgtaaacaaaagtcataatgaagttctaatagaggtctatacagttgttactgaaatgcaaaagaaggaaggatttgctgtgcctggagattctgagaaggctttgagtaaggggtaatgtttggcagtcattaagaaggcaaaaacctttctaagtagaggaagtaagctctctagagcgaaaatataaattaagcttttccatcttcatctttactgaccatacatgtagcatgttacctgtaaatggagttggacttgagtcaatctggatttttcatacttcctatcttggtgaacttatctcaaattccatttttgtcatatgtaaaaattatagctacctatcagggttgtgatgttaacatgatctaacatacaatagaggctggaaatttttagtatttttacccctcttaccctttctttcctgatatttacagtctgttcttgtaagccaagttagcccaagtgccctagaaactcattttgttaagtagaattctcatgtattggatgatcctatccataaagctgtgcttctcaaactttaccaccaaagtctccctaataacagaacaacctcatgtacctaggaatctagggaagacaaacacaatcttattgaagtgtcatgttttatcttaaacatttacacatatttttatcatgctcattatttgtttgtattactagaaaacagtctcaggctgggcacggtggctcacgcctgtaatcccaacactttgggaagctgaggcgggcggatcacaaggtcaggagattgagaccttcctggctaacacagtgaaaccccgtctctactaaaaatacaaaaaattagccgggtgtggtggcacatgcctgtagtccccactactcaggaggctgaggcaggagaatcacttgaacctgggaggtggatgttgtggtgagccgagatcgcgccactgcactccagcctgggtgacaagagtgagactccgtctcaaaaaagaaacaaggaagggaaaggggaaggggaagggctcaaaatgagttagattacaggcagttctcatgttgcatggttcttacatgcaccagtttcattaatctggtttagttaaattacatcagttcctcctaacaacatttgttcaaatctcagttaccaaagaatttgaactattagtacttgtaaagtagtagctgctagccctcacttcacaaagcactacataaataacaagtgcacgtgataattagtaaccaatcacataacttctttcaaagtctgtcaatgactggtcactgtgtatgtttttcactgtacagtctgcaaagcagatagttgtgttaactccttgtctcccagtgataaactgacatgatattttacaaaaaatggatacttgaatggggaattgtcaaacaaagtgctacaatgaaacaaaacaataatgcaagaagtgaaatttgaattgaactctatatagagagttataaaagaaatagccaactgtggaaatgttgacactgctgccatacaagagactccagatatgcagctagagaaacttaaggaaggtgagcttatcaacgtgcattcagaaagtggttatgattacaagaatgaagatatcccagaggaattgacattgtcagaaaacttcacattaatcgaattctcagagatgtctcacaacattgaaagcacaaaagatgaaatgttagaagctggtgcacagtaaggataaaggagtatggcagttcaccaaggcatggaaaagatgcctgctccatattgttaagttatacagtgagaagaaggaggcgaacatagttcagactactcttggtaggtttttaccaaaaaataaaatattttaagctcaatatttttgacattgcaatgtactttaaaagatgttggccgggcatggtggctcatgcctgtaatcccagcactttgggaggccgaggtgcgtggatcacctgaggttgggagttcgagaccagcctgaccaacatggagaaaccccatctctactaaaaatacaaaaaaaattagctgggcgtggtggcacatgcctgtaatcccagctagtagggaggctgaggcaggagaatcgcttgaacctggcaggcggaggttgcagtgagccgagatcacactgttgcactccagcatgggcaacaagagtgaaactctgtctcaaaaatatatatacatattttactttttcttcatttccctatacatttataactgacagtaagagtatttaatgttttgacaattgttaaagatcttagaacaattataatttttcccattgattattgtgatcactttgcacagtttcaggttgcatagtaatttttataatctcatactaccctgcaaagtgaggactgtctgtgcttaacttttcactcgccaaaattctcaagttgaattgcttttctggaaagtcacaccagtttatctggagatgtatacgccccattgtgagaagctcagggctggactgagatgggcgttcttaatgcatggtctcccaaagactgaggacatgtctttgcctttcttagtagaacactcagtgggccttgaaatccgtatttcatatgtaaataccataaaatgagttctttccacttagtattaggactagggctttgtagaactattatgttaggttcagctaatacaatttgattcaccttttgtcacttgtggaaactatttttaaaacaaaggcttaaaagcaaaggtttaaatggctgggcatggtagctcacacctgtaattccagcactttgggaggctgaggtggttggatcacctgaggtcaggagtttgagaccagcctggccaacatggcaaaaccccgtctctactaaaaatacagaaattagccgagcatggtggtgggcccctccaatcccagctacttgggaggctgagacaggagaatcacttgaacccaggaggcagaggttgcagtgagctgagatcacaccactgccctccagcctgggtgacagagcgagactccatctcaaaaaaaaaaaaaaaaaaaagcaaaggtttaaatggatttttttttttttactgtcttaattgaaattgggttatgaagtgatggtctacctttcaaaaaactagttgtacttcatgttaacttcttaaaatattaataattactaaggataaagctaacatttatgaagcactatgtgccagcaacattctaaacactttgactatatgtaaatatatatactctctttttgattatactgaaattggcttttatgttagcaaaaatcaacctaaatgggtactatattctgagaaaaactttttgtcatttcatttatttaatgattatacctttaagcaagtttcagtaagtactttgaaagaagtcctgttaatatcatggcataatattttcttgagattaaagtcagaaaatgtaaagcttgccagggactctgaattcataatgtggatactggatcattccaagctcagtaaacaagagtttgaaaatagaaaagaagacaaaagaatagaaaaggcctcctcttctgtataaactatagctggacttgaactaaagacatttgcaaagaaagaaacaaactcctaaataggtgtagtgagcaaattttccaggttttccaagttcaacttcatttcatacatttttttttcccacgaaatgcagtttgttatatgtgtaaatgggatatcatttctattcttttttttttttttttttttttagacagagtttcgttcttgttgcccaggctggagtgcagtggcaccatcttggctcgctgcaacctccgccttcccggttcaagcagttctcctgcctcagcctcccaagtagctgggataacaggcatgtaccaccacgtctggctacttttgtatttttagtagaaatggggtgatccgcccgcctcggcctcccaaagtgttgggattacaggcgtgaaccaccgcgcctggccatcatttctattcttttgtcgtatcttaccaaaaaaaggggattagggagctgaagaccatccaactagtttatcaccagaatatgtagtccctataaccctcctggttgtgtggattgacctcttgatatttcctcattgtatttgaatcagaacctctaagtgcttcttttgtttggttttgttttgtctgtgtttagttgtattaccctgctttgttctttaaaacgatttgaaatacctcatattgtgatttgttatttactttttccttcttcatatgaatctgtggtttacttggctatataccaggagaagttatgtaaatgtttggggtcagtctgtgtggtcagtttctgtcatttttgttagtaaatgctccactgaatagtattttcactatgaacggtacgtggaacaaataataaaccatgtctgacaaacagaatgtgttcccaaacctacttctgggcctgttgtagatccagttttcattctgacttggcattctacctgtctttagttttctaccgtcaaccctgccagccatttcttattcacaagacagagtcagttaccttattaatgtataggcttcttgacataattaccagcttatattgtcgcttgtgtctctttttaaatatattttttactttgagcctcgttttctaaataatagcttttttctatcctgttccattaaatgggctttcaaggctattccattaaataggctatatctttaggcctaatggcttgtgtttgagccagagaatagcaaagcccacatatgtgtatactgttcataagtggcatgtttcccagtgtcatgctaaacctcagctgcttttataataaaagcataatttctgttcattggagtattcagatgaaaacacatatgcagctcctgagccacttttacttaaggtatgttggagtactgtgaaataaaacttttctgattttagtatctcaaaatggaagcatccctgtatgtgttctgttgtatagttgttactcataacttgttacctctctttttttttattattattgtttattaactatgacacaattgcactggagactggtcagctccccatcatagtagctaaggacctgcaatttggaactaaaaagatcttgatttgaatattggtttcaccagatactcactttgcagccacaaacgagttttgtaaccttgctgcacttagtttacatctgtaaaatgaagaaaatgacagtatctacattataaggttgcaatgaggattaaatgagatgacacttgtaatgtgcttagcaatatagcctggcacctacaagcacttaataaagccagtgtggctattattctttatctacatttaccaagttcctcctatgtaccaggcgtggtcctgggtattggggatacaaagaagaaaaagacgtggtctctctcctcagaatcccagagtcttgtggtacagacacatttgaagaaaaaataccaacatgatgcaagaactattaaccttggctattttagggatgtcaagggacattttatttccacttgaaattctttatatcatgcacatggtttacttttataataaaaattaatgactgtcacaatacagtagaatagttgctgaatttgagataagtatatagtgccgtgagaacagagaagcggaagggaaaagtcttgttggaagctgtgcaccatagcctttgcatcttaatcagatttccccctaggtatgctatggtacacttctttgcaagatgtcagaccaaaataacgtggtgatcaggtagtagataagctgaaaactgtctatgggatggtggctgtcccactttacagagagctgtctcaggcccagctgctttgcctcccaagatttttttacaaggctacctctgttcttgagtggcattgagtaggttgagtgtagaatgactttcagccatcataatgggaaactactacttttgacaaaaaagtagatttggcctggttcattgctgttcatcccacacaagatcatgaggcaaccctaggggtgactgaactctggcctcccgtcagacctagagcttcatgaactaaagaggaatgattttgaaactgtgcccggtcatcctcttcctcattcctaagcaattagacgcattttgagagggctggaaccaatctgcataagcctttagctccatgggcttatccaccatctaatttagggtttaaaacccttaacttactttcaagctgattgtcaatttagacctgaccttaagatttctcataacttgttacttgctttttaactgaatttgtcaacattcaagtttataaaactctactacgttagctagcccatttaaggaagaaagtaatccaaaaagtcagaaatgttccctaataccaaatgtccagtttttttattgtgctatcaaatgtttttaagtttatttttttctaatttgtttccttagctttcagagtaatttttgtttaaaatgaaaaatgaataggcttgttgccataatttaattgtgctgaattgtttggccataacttcagtggtgatgaagaccagatttttgagctggggaatctgttctgtttggatctgacagctggctacattaaatatcttggagctttttactttgcatggatatgggaggttgggagggtgggaaccgcaatagaagaaagcagtccgctttatttaatgttctgcatttgtttgctgattccagtaacattgtgcagctgtttgaacagctgccttttgatttccttttgtttactgtttagatttattaagcttgtctttaatactgcttgttgtctgttctttaactagctttctttctttattaaatatattttagtatgttctgctctgctgtggtctaggcatgttttaataatataagttaatttaccaaaggacgaatttttaaaatgttgcagaccatactgaagtggctatgcttactttcttgttgtcccttagctttattattgtagttaaatattttgtaatttggcaactaaattatcttttgaaattaagtcagaatttcagtcatgttaaaccactatgttaacttctaagtctgccaacaggtagcttagtctacatacttcagagtacttttttaaaaaaaattgccagactaattgtaaagtgtgtggattttgttttaactactttctgtgaacaaattgaatatctagaagtatatacacacatgtacaaggtaaaaagacaaattttatatttatttgttagtctccttagcctattaaggtagacttactacaaggttcttcagtattatgggacttttgttctgtatttacaggtgagggacttgtgcattgcttatatgctggtgacattaacttatctctatattggagtcctggtttttgcttcatttccttcaccaccattatccaaagattgtattgagcaggtaaggcaccgtgtaccctctctgtgtgattgtgtacactttcatgtatttatagtaggtagggtgatacagtggcaagatataacatcagataggcctgggttttaataccatctctgctatctactccaagtatgggaatttaggcaccttcccttttctttctgagctttatttttcttttccattaaatagtataataagtacccccatttgatttttagatggactctgagataatgtactacatgccaggcaccttgtggtactcaaataaatgtctactattatgtacatatatttctctttttgtggggaactggtacaagtagttctcatgtagttataaaaccacagagaatacattgaaggaactccctatttttaaaagcctgtatcaggaatgccctggataaactagagtctttgtttatcagactctaatgattaatcagactctcattcttatattgagtgacaggcagcaaaacaaaaaaagagtatttggctgttaaaaaaagagagagagatgtcctatgagtcaccagagggttaaaaaaaaaaaaaaagagagacagagtaaaagaaaaaaatattttaataaaagattgccataactaatattttctttgatttaacccatcaaaaacttagcaatagtatagtctttagttataagtgactgaagagtttctcacaaaaaacaacatttcacaagtgactttctggtcagaagaaattcctcttatagagtacaatggaatatactaatgtgatttattacagctgaattataatggttatttcagcaaaataatgttaatagtgttctcatctttataagagaaataagtttgaattactgctattatggcagcttggaaatgttcttattttcttgatttccttgactccagaagttctttggcagccaaatgtttgctggcaatttccctgatatgaacaaactcatacaaagcctactcccttgggaataggaatatttgtggtatttgtatttgaaagaaaagataaaaattctaagtaattaacttttttttaagataccaaaccaaaatggagaaaagggtcatgaaaggaagtagagataaatccttttaaatttagtgatagactaaacaatgatgtagtaggtgatagacatactctcaccttattctgtcatctttacttcaaaagtgcttacagtgcttcagaggaggaaagcagcagagccagagagggtaaaataacactgaattaaattagctctttacatctttaaagtggactggtattttccttgaaccacataaagcaatgctttctcgatctatctgtggtgaaggacaaaattgtctttgctgttgctttaatgttaaataaattgcaggctgatacttttgtaaaatagaataaaattgtggcaatgtcagattcctgtaaaagtttctgaacactttcggtttctatacttacctcattgaaaaaatacttaacaagtagttgtggatgggcactagtccacaaaccacaatcggagtagcacctgtgttcaaaataagcagaagacattccattttatgaatgtgtgtactgaatttgatttttaacatgacctcattatctttcttggattagaattttttagacaacttccctagcagtgacaccctgtccttcattgcaaggatattcctgctgttccagatgatgactgtatacccactcttaggctacctggctcgtgtccagcttttgggccatatcttcggtgacatttatcctaggtaagggctcttctcttgaccagcaggatgtgccaagcaacaaatgactgtgcaagcaggtcagtttaaagtgtgactgatccttttgctataaaaatgcctaatgcaagtggtgactaaagatagatcattggtgtcctcttccctgaagagctttaaaaatagaagccactcccttgtctagaatgatttaaagttcattccttccagtatagttaattagctccgataccatttatatttatcttattatttaattgctattgatttacatattgtcaagaagtttatagtgtatagtacctatgttggcaatgtgtagctaatgagaagcaacacttttaattattggtcattgaaactatcagggccaagggaaaacttcccctttgccctctgaagttttgttgaaaatgaccgacaagaggcagattaataggcaaaaagggcccggctcagtggctcatgcctgtaatcctagcacttttggaggccaaggtgtgtggatcgcttgagcccaggagttcaagaccagcctgggcaacatactgaaactccatctctacaaaattttaaaaaatcagccgagcatagtgggcatgcttgtagtcccagttactcaggaggctgaggtgggaggaggaggatcgtttgagcccgggagatcgaggctgcagtgagctgagatcacgccactgctctgggtgatacagtgagaccctgactccaaaagaaaaaaaaaaaggagaaaaggcatataaatgtatttgaatgtggttttatgttacatgggagcctttagaaagaagacccaaagatacaggggaaattgtccttttttatggttatgtttatgtgaacagccatgtctaatgctaatagactgagtggggaactccagcaaggcccctctgtctagattcttagcctctctgagcatgtgtttttttcatctgcgtctggggcaggaccctctctggaatgggagtcttatgacctgcagtcaaacaagacaggtcagatcatttctttatggctagtttttacacagaaatagtgggaaattggagtgatatttttaggttttacggccagcttgagggaaaaggtttccatgttccactttggggaagagggattctagtttctaagatagcttcgggagaatgggactgagattcagaaggtcagagaaaaacttttgtttctgaggctttcattttagggtatggttttctgagtccaacaatccttacttttatattcattaacatttatgcagtttttgttgttgttgttgtttgtttttgttttctgagactgagtctcgctctgccgcccaggctggagtgcagtggcgcgatctcggctcactgcaagctccacctcccgggttcacgccattctcctgcctcagcctcctgagtagctgggactacaggcgcccaccaccatgcccggctaattttttgtattttttagtagtggtggggtttcactgtgttagccaggatggtctcaatctcctgaccttgtaatccgcccgcctcagccttccaaagtgctgggattaccggcgtgagccactgcacccggcctacatttatgcaattttacataaatgatcaattgtttagaattgaaggtcagatatataattaatttttatttgatatataacaagtttaaattactgctataattgttaacctcttattagggatgaaggagttgtgagttcttttgaaaatcttttcaaagctggttaccctcatccaagagaaatttctttttttttttcaagagaaatttctatatgtcatttcagagtttcccagcagccttcttgtggacctttggttaactcctacccttacattaagtctttttataggttcatcttagtgaaaagaacctagtccacttttattaggcatatgttcttttaaagaaagataacttaaataaaatttgaaaaaaattgcatttacagtaagcaactaaacaagtggtcttaatcagttcttgtttaaaatgaactgatgtagtctgcttcttcgataaataatttttgccataaatatgttggtttcaaaacaaagcaaaagtcaggagttaccaggtctcaagcactgataagtatagcagcagctatggttctagtgttattatccagaagattggagctcaataaatgtaagcctctgattgtgtttctactctgctgtatttatattcatcaaagaaaataaatacagtgaagtcatagatgaaaaaatgctaagcaaatacattattcctgttttctaccattattttgcagaatgtggctatctttacaataatgttttttcttcttggaaaaagtcagagatttcccttttgttttcacattacagttcttcccctaccaccaagaacacattgtcattttcatttatccgacagttataagcactttatagagtgtgcatactttggagcataatttttggtctcaggaccctttatgctcttaaaaatgtattgaggactccaggagctttagtttatgcaggtatagctatcagtatttaaatattaaaaaatagaatttaggttttttgtttttcgtttttttgagacggagtttcactcttgtcgcccaggctggagtgcagtggcatgatcttggctcactgcaacccctgcctcctgggttcaagcaattctcctacctcagcctcccgagtagctgggattacaggcacccaccaccatgtctgcctaattttttgtgtttttagtaaagatggtgtttcgccatgttgggcaggctggtcttgaactcctgacctcaggtgatctgcctgcctcagcctcccaaagtgctggtattacaggcatgagccaccgtgcccagcaaagtatttttaatttgtttaaaatcaataataaaaccattacttgttaacataagtaacatttttgtaaaaaaacactttcaggggatggataccccagtctccatgatgtgattattatgtattacatgcctgtatgaaaacatcttatgtgccccataaatatatacacctactatgtacccaccaaaatttaaaaaaataaaaataactgctttcaaaaaatttttaatttagccgttcgtggtggctcacacctgtaatcccagcactttgggaggccaaggcgggtggatcatgaggtcaggagatcgagaccatcctggccaccatggtgaaaccccatctctactaaaaatacagaaattagcctggcgtagtggcaggcgcttgtaatcccaggtactcgggaggctgaggtaggagaattgcttgaacccaggaggcggaggttgcagtgagccaagatggcaccactgcactccagcctgggtgacagagcgagactccatctcaaaaaaaaacaaaaacaaacaaacaaaaaaaccctttaatttacatttgcaaaactctgatgtttgttttactagcagacaattgattctcctctctacttctgcattccatgttataatatcctgttttcgtttagatttgtgaagaaaatccagcctcacatagatagttggaaaaagaaggagtacttttaatagctttttcatataattgtggatattcttctttgatactgtgccaaaacctgacgagtggtagcttcttatgagttgcaacgtggaatctgaaacttgtttacattaaaaccaattggtctatcgtgcactttggatcttttacgcatgcatgattttgtaacatctgtttgatcatttggaaaatattggttcactagttctgtggatcttccaaatgttgacacacttcattttacaatatcaaaacccactttcattaatactatcactaatttcatcacaagagcctttaaacattgggaaactgtcaagctcagggtagcaaatacaagttttccaaaattctagtttttatttgaaaactttaattttatctttggcaacaaatactgccagttgttttccttgaattatataagtgacaagcttatataattcatttttctggaaaatctctgtcaaacacctgagtttgaatgaccatagtttgactgcaattcaagtaaaagtagcatttggtaggcaaaacagctaggtccccttcagctcagccacacaggtacttttcctcaagacttccagcgtactgtactgcagtacgcgcagatgtgctttattatgactttcctatttgatcacatagaatatttaaaggatatatattcaaacatgacatttagcaaaattaatgttctactcctttatcaaggactttttttatactttggagagtgtttggcattaaagaatagagtatggaaagcatgggtgttagccggtcatggtgacacacacctgtagtcccagctattcaggaggttggtttgagcccagaagttcaagccttcagtaagccattattgccccactgcactgcagcctggatgacagagcaagaccctgtctcttaaaaaaataataataattaattaaaattttagaaaaggaatacagatggatgcaactgcctccctctgtgtatacaaagttgtttccgtttataatgcagaaataacaaaagcccagccaatacctcaaagctctgaagcaattttaaggttagagtttctgggtaaacagtaagatctgtaagccctaatatctttctaattcatcagggtatatgactaaccacttatttatataaataattttctttgtttctaattctctgtaatctttatctgggattaattaacctctgatgacttgggcccaaagggttgctttgatgtgtacatttggcttttgagaatcattttcaggggaaatggagttctttcttcagcatcaaattttcatctacattatttttgtttgtgtccaaaattgtttcccaaaccttgaattgttaatatctagttaaagtatttagtaaatattctcttcatggtagtgagtagctttaagttctttctttatggtcaaagtatgaagtatgaccactttctttaagtggttaaatctggaagataaaaacctgcccattttgtctttcccttaatataatgtgtttaatataaaagtaatttgaacactttatgaaaagtttgttaaatatagaaagaggcaatgttatccaaaaccccaaattgtaacaaaatcactactgccttctcagtgtatatccttctgatttttttttccaaatgtttttggggttttcttgtgtagtgaaaacctagctggctttttttctgaattgcctagatagtattttacctgacaaggtaatggtgataagttattttaaataatttttaacatattctgtcaagtaaattattgtcttgctatgtccaggattcttctgttttttcataaatatcttgatattcatagcattttcattgtttggattattttctcaagatattccaaatggaataatagatcaaagaatgtgaattctgatacacactaccagtgtacttctacaaaatttaaccagtataattgcacagaagagctaatttcactttctcgttaccacaattgaggactactgttaccttctatttttgctgtgattttatcaagcttaagacattttgattttaacgatgttaagaatgaactgtagtctcatattagtggttataatttgcctatttttatattttttctttcttccaaactctcttctcaacttctagcattttccatgtgctgattcttaatctaattattgtgggagctggagtgatcatggcctgtttctacccaaacataggagggatcataaggtactgccttgtaagggaatggtgcccttacatatattggtctttattttcaggcttttcctgttgttgttgttgttttaatttaattgtatgaaattcctatgagtatttaaaactagtaatattcaaatgcagccccttggtatcagttaagatgctcattatcttccctttctgtttgttctggtggagaactcactctagaagctccattatcccttagcctcaggcatcattttctttttctttctctcatcatcttccactttatttcctctctatatccaaaataaaaagttatttttaatatatgtataactttttgggattacctgggaggtcctttatttgtcagagcttccttaatccattctaagttccttaatccatttctactcaaaagtatttttcaatgtcaattgtagtcaaaaagtaagagtttaagtaagaatttagaccctagatggctttctttaatatccttttcctaaaaacgtgacaggatgaatagagtaggaataaagttgtacctcaaattctcatgggaaattgggatttagaatgatctgatttctcttactatggacagcaggaaggagtcattttttttggaacactcttacctaagaaagtaacaaggaacaagaaggggagattgttagcctgatgcttattgaatataaagggcttaccagttcctattgaactgttcctcaagaaaacccaagtatagagaaaaggagaagaaagtgcatatttctctgtcacagtctcatgtttaagtatttttgttattatctttcgtaatcatgctgaatgccatggtagcatttatctgttcttatacttaaaccgggatgctaacggtccctcaaaaactgagaatgagtaattagtttataaaagatcaaagataggaggcctagctccagatgtttctgaggaagtagccacaatcaccaaatacagaggaactacagagatttgagggatgaataaaaagtctttgttaagcagatgctataaagatgagcaggaaatcatattttatattaacttagcaagtaaagtaagttttaaacccagatgttttatgtcaacaacaaatgaatcaaaaataatttttgttgagctatcagactgaggaggatttaaattgtactatgtttaccttaattgtaaaaagcaaagtgcaagatgaatattaaccccaaaagcttttattttgcagatattcaggagcagcatgtggactggcctttgtattcatatacccatctctcatctatataatttccctccaccaagaagagcgtctgacatggcctaaattaatcttccacgttttcatcatcattttgggcgtggctaacctgattgttcagttttttatgtgaaatacctcaactgtttttttcaagagctctcatgatattttgagccttgacaacagttctatataaattcacttgtaaatgctgctgttgtgtaattctaaatattttctaagataatttgaaagcaagggaaatagtggccccttaatgagtatttttttattggggtggggaaaggggcaaaaagaatgatcttagtgtctttacctttctcatattaactcacctctttattctgtggtcttttctgaatagaaatgtatgccctaggaagaaatcatgctgggttttgcttttagagataaaaggtggtggatttattttgcctgcagtaaagattctcagggtgtcagagcagcatattgtcaaatcctgcttctgttttatgtttcagtgtattcactttcattttcttacttactagaccatttctgcagtttgcccaaacctctactgtttgggacagtaagccaaatacctcatttttaaaaagaagttttcatggcatcagtgttaataaagtacatttttaactgagtcttaatctctatttgaagaaaaagtagagacaaaagtaatgtcaatgtaatccccaggatcatgaaatgtatacaaaataaataaagtaggagagtttgttgctgtctaactcctcttttatttctaatccagtaccagtgacttagatcgaaattacagttccccaagccagactttgcataagaacaagaatgattgtccccatagacccagggggtgcttttgctttttggatccctgagatcccagcgtaggctgtcatgatggacccagtggggaaagcatggcagagaggagcctgagaggcccataggggagacggcgaacagagaaggggccagggaggaagaggcctcagcccagcatattttgtgtcctctgggggtggactggtttctgcaccacaaaaaaggattgattttgtttgaggtatgaccttcagaaagagacctccatctgcttacttctgtaactggcagtactgttacaggaaaggggtcctgatccagaccgtgagagaaggttcttggatcttgcgcaagaaagaattccaggcaggtccacagagtaaagtgaaagcaagtttattaggaaagtaaaggaataaaagaatggctactccatagacaaagcagccccgagggctgctggctgcccatttttatggttatttcttggtgatatgctaatcaaggggtggattattcatgcctgcccctttcagaccatataggctaacgtcctgacattgccatggcatttgtaaactgtcatggcgctggtgggggtgtagcagtgagaagaccagaggtcactctcattgccatcttggttttggtgggttttagtcggcttctttactgcaacctgttttatcagcaagatctttatgacctgaatcttgtgccgacctcctgtcttatcctgtgacctagaatgccttaaccatctgagaatgcagcctggcaggtctcagcctcattttacccagctgctattcaagacaggagttgctctggttcacatgcctctgacagtacagagttaaaaccctgtgagaaaaactccttaaatctgagaaaaagattaaggaatctggatccttggaatcgacgctcttcccttatttcttctgaactaaaagctaaactagtatccacattcacgttttccaagtaatacagcctctgtgtccaggtcaggatacaacatggtgattttttttttctgaaaaaattagatttctctaattttaagctaaagtttaaaaatctattgtatgttcacctctcagatagtgtatggatttgtgttatttccttcctttgaaaaagaaaaatggtttttgcaaacctagtaaggagcccagattcaagatcagccttaatttctttcagcaaagctttctgtcctattcataaagccatagacctatattaatgatgaactgtatttcctaaagctcgtttgttttaataaaaagtctcattatgaaaatctcaagcccacacaaaagtaacatggagtaatacggtgaacctcacaatgcctatcccctagattaataattataaaacttggctgtatttgcttcacctatctttttttttcttttccactgaaatattgtcaatctcagatgttatttcatcactacaaaccttaatttacagctattagtaatagccttttgaacatagttacattgatggaaatagtctcaaaagtttttgttcacataaattgctggtagtaggagttcggttaattggaaaattctgcagtaggtgtcagatcactgtgttaatttctcttagaaaaggagtataatgaatggagaaagtgcttctctgtgcttgagagcccctgaatctttatgacttcagaatcttattcagttaagagacataggattcaaaagccagacagcactgggagcgatctaggcttaatcccagtttatccccagtcaccttccttctctgtaaaaacttcagaaacagggctgggcactgtggctcatgcctgtcatcccagttctttgagaggtggagacagagtttcattgccacttttcaataatgtacttgaatgttttaacacatggaaaaaatgatttaatatatttttgtccatttaatgaactaagtgaatatgacaatgaatgaggtatttactaaactaaaagacaatgtgaatctttgctattgtttctttaaaagacttgatgtgaggccgggcatggtggctcatgcctgtaatcccagcactttaggaggccaaggtgggcggatcacatgaggccaggagttcaagactcagcctcgccaacacagtgaaaccccgtctttactaaaaatacaagaattagttgggcgtggtggcgtgcacctgtaatcccagctactcaggaggctgaggcaggagaattgcttgaacccaggaggcggaggttgcagtgagccaagatcacgccactgcactccagcctgggtgacaaaagcgaaattccatctcaaaaaacaaaacaaaacgaaaagacttgatgtgggcacagctgtgatcccagctcttggaagactgaggtgggaggatcacttgagcccaggagttcaagaccagccaggacaacatagtgagaccctgtctctacaaaaaaataaatttaaaaaaaattagctgggcacagtgtcatgcagctgtagtcccaggtacccaggaagctgaggtgagaggattgcttgagcccaggacatcaatgagccctgattgtgccactgtactccggcctgagcaacagagtaagaccctgtctcaaaaaaacaatttttttaattaaagaaaaaaataattggctgggtgtggtggctcacacctgtaatcccagcactttgggaggccgaggcaggcagatcacctgaggtcgggagtttgagactagcctgaccaacatggagaaacccccatctccactaaaaatacaaaattagccgggcgtggtggcgtgtgcctataatcccaggtactcagtaggctgaggcaggagaatcgcttgaacccgggaggcagaggttgcagtgagctgagatcgtgccattgcactccagcctgggcaacaagagtgaaactccatctcaaaaaaaagaaaaaaagactcgataatttagaacttctaaaatcttgtattagacttacgctgtatgactttgccttcttaagtttttttttcatgagatcaactctttggcctattatttggcttggtcagagaactctttgtaagtgtgtatatcctggcccacacattagaatgatgagatatgaagtcattcatatctcaactaattttagaccttctttgtctgctgtcatctctttgaattttctaattgaatttctttcactttttgctctcatgcttaactcttgaatttagcttaacatacaactgaggatattattaagtaaaatatggattatttagaggggtcttccttagaaagtctatatatgaatatgtggtatgctaatagccagaaaggacaaagaaaattaagtttgacacctgtgggtgatcatccaaaatcaattttattatcacacccaaaaaatgctttgatgtaaggaataaatttattcataaaaggggactatattaaagggaaatactttatttatattaagtatattttgcaaatgcaatgcagctactaactatagaagtaaaagacttttctgtccagtgctttggaggagataaagatgtataagacatcattcatatctgaaatgaacttttaatctagtaaaggaactgtgtatataattaactatgatgcaaagcaatttatactgaggactattagagaaacagatccctttcagttgggagccttgaggagggttgataaaagaagccgagaggtcaagcagcaacgacccattttcaggttcctcctcataactgtccaaaatttaatatttggtaccttcaccagcaaatgcaatcatataggttaaatgtattcgcttttagtttggtaaatttcctctaagataagttttctgcgacttgtttaatgcttctgtatgctatttattctctttgcattttgaacacattgcattattctgttaatcttggacagcaaagcacaatggattaatagggcaaataattagtaacacattgggtggtacaaacagaaaaatgcataagtttttctcaccaaagatttgacttatttaaatatcagtattcaaagtgtcaaatgtttgaactcattgataagagcagaaaatattgatgttgtatgttttctttacaaagcactgacctaattgctttttagaatctggtggtggtggtttttgttttttctaaactcaatttcatccccattagaatatccaaaaccaaatccaaatctagttgacacctaaacagtagaatgttacattagtttgtgacccaaagtgaaattaatcccctagatgcacacaaactggcctggctggccggttttacagtccactgctgccttcacttcagattatgtaaacacgtgttgtgaaacagctctgacgggaaccttataacctaaacattgttctctgaaatgtaatttgttgtcttttatataaaagaagaaattaaatcaaagataatttgaaggaaaacaactctgggattttgtttaattgaattttgctgggaaatattattgcttggtagcactggccccaaggtcaggaagaagctgggttccatctttcgccgggtcaaacttctcaagtgactttgcccctgtgcctcacatcaggccccaaggagccccgcaaagtgttctgatcctaaagaaaggcattacattatgttaactgaaacctaaaatgactatatctttaggacaatatactgttgtgacctctccctctaagaatatttccgatgaatgttaagtagagcctagttcctggaagagcttgatgtcctaatcctccagagccacttaagccaatagagggctctaattttcccccttctctaagtactattacttcttccccagtattatttttatgttccatctcttcggcaaaaataaaataaggctatgtctttttcaacttctctattctcttttgagatggagtctcgctctgttacccaggctggagtacagtggtgcaatcttggctcactgcaacttccacctcccgagtttaagcaattctcctgcttcagcctcccaagtagatggaataacaggagccagccaccacaaccagctaatttttgtgttttcagtagagacggggttttgccatgttggccaggctggtctctctcaaactcctgacctcaagtgacccaccccagctcagctttgcggagtgctgggattacaggcctgagccactgcgcctggccattcttacttatctcaggccataaagtacaggcctgcgatggggatgggaaattgctcacactccagatttttcctcctttggctctctctcaatcccaagtgatcctattgtttggtcatagtaggcactcaatatacacttgtttaatcaattaattaactagtcaggattctttatggaaaataataaggtaattgctattatctaggatgttgttccatagccccaaaaccattacaaaataaaattggggtcagcaggttcaatattagtcattcagtcaataactaagtactgactggttgccagaccttatgctaagcactgagcatacagtggtgaacaagccagatgtggctctgacactttaatattcctcaccaacctctaggcatcaacaaccaggtcatccttccaggtgtcaccgaaatgccaggctattgccccttcctgctgcctgtctcaactgaatgctgtgctgtggccacatcatacacatgttttgaagagaagaatataggacaatgttgcagtaagtaggtctctgtaaagtgaatcatttttatcaaaataaaactgcttttaaaaagttagagctgggtgccgtagcttgcacttgtaatcccaggtactcaggaggctgaggtgggaggatcacttgaggccaggagtttgagaccagcttgtgcaacataatgagacgctgtctctgaaaataataacagaaagttaaccaggcatggtgacacacttgcctgtagtcctagctacttaggaggccaaagcgagaggatcgcttgaggccaggagttcaaggctgcaatgagctgtgattgtactactgcactccagcttgggtgacagagcaaaaaaaaaaaacgacaacaaaaaacctaggttaatgataatcacataaggttatgtggtcacagaatgaacatgaatgacgttttatgggggattctaagtgactcatttatgttattactttattatttaacagatttttctaaaaagatgtctgtctaagataaatcatggaaaagaagacttgtagaaatatagctacagtcaacccattaaatcaagaacctaccgacggagaacctttaggataggtgagaaagatccttggtgaaaggggtagattcaggttttgtggggcctgaggcttatacagtttggagttatctctttaaggagatacacaacattaggagtcccaaattagaaaggaggccgaccgggtgcagtggctcacacctgtaatcccagcactttgggaggccgaggcgggcggatcagctgaggtcaggagttcaagaccagcctggccaacatggcaaaacccagactctattaaaaatacaaaaattagccaggcatggatggtggcgggtgcctgtaatccctgctattcaggaagttgaggcaggagaatcgcttgaacccaggaggcagacgttgcagtgagctgagatcgcaccactacactccagcctgggcaacaagagtgagactccgtttaaaaaaaaaaaaaaaaaaaggagcccatgcaagtgaggagccttgacagcagctttaaggcaaaccatccacaaaccactctgcgcaggggcaactggaaggaatgttagaaggaggaataagaagaaatgtttcagtcaccttgtttgattatgtcaagctctgagtttctccactacctttaagaactgcaacttttaccaaacctaagcattatttctggaacagttaaattggatttagcaaaatagcatgggatacaaattcagtaatggttgagatcaaagtaggacatttttcttttttagattggaaagtttttacctgggtatgggtcttttaagagatactttcagcaataatgaagaattcaaagaacggtttaattttcaaagagtttctagtattagtctatcttagcgatgaggaaccttttaagggctcttgacgcataaaacaaacaaccaagagcaacattagagtaaggcaacatttctttatactccaccttgttccagaaaggatctaattctactgcacgaaagtgcccagctttaaaggattaatgttaagttttttttagaaactaaattagaaatttatgacactccttgaggagaggaaactaagacttaattcacataaataattttatcactcctcggtgctgtattatatataaaacctttattgcagatagattaaagcccaatccaatgcagtaaacttttactcattgtcctagagttggaaatgcaaagatagagccatcatttctagtgctgccagagttatctttaattaatatgaaactgactatgcctttctctgtaaaatccttcagtgccccagtagaaaaataggcacagggctgaacatggtggctcacatctgtaatcctaacactttgagaggccaaggcaggaggatcacttgagcccaggagttcaagaccagcttgggcaacatatcaagacctcatctctcctaaaaattaaaaaatttgccaggcatggtggcatgtgtctgcagtcctgcatccagagttggttccttccagtgggttcttggtctcgctgacttcaagaatgaaggtgcggacctttgcggtgagcattacagctcttaaaggttgcacagatccagagtgagcagatttattgtgaagagccaaagaacaaagcttccacagcgtgaaaggggacccaagcaggttgccgctgctgactggggcggccagcttttattcccttatttgtccccatccatgtcctgctgattggtccattttacagagcactgattggtccattttacagggtgctgattggtccattttacaaacctctagctagctacagaaaagttcttcaagtccccctcctgacccagaagtccagctggcttcacctctcaatcccccctctaaacatgacaccccaactactgttgggaattgggcaatgaccactctagctacttctgctggataggggcgaagaaggggccctgcagtggtagtgtcctccagaggggaactctctaggccagtcaaagatccaggggtcctcagtagaagttttgagttgagctcatttggggttccatttgtaagaccatctgtagcttgatggcctccatcctggaggaaacaaatttgacaagcaggttaaaaatacagggcccgaaggtgagtaatagcaagatggctgtcacgggacctagaaaggggagaagccatgttgcccaactccagaggttggtataagagtttgaaaggtgttgtctgattcagaagccttttcctgtaaatgccaggcagtgtctcatactatccctgactggttagtgtaaaagcaacactcttcccctaagaaggtgcacagtcctcctttctcagcagtgaggaggtctaggccttggcggttttggagagttactgctgccaaagagtctatttgggattgtagagtaaggatagattttgttatttcttgtaaactgtcagaaatcttttgagagtgtgtggtagtaggatagtgaagtagataaactggctattctggttcctgtagcagtggccattcctaaccctttaagtaggggtattagttgtatggctctgtgctaactgacttgagctttgaggggtactgatagggtctgatttccacaagctttgaagttaggataacacattttatactgttaacttttagcaaactttacttctgttgaaaaccttgtaagtttgggatatcaattattctttgctattaataagacctcattcagtccatattaacttaaaattggtatagatggctccttcctgattctgtaagtactttaaggtttagctgagggcaaacagcttgcgtgtttgagcagatcaattattaggcaattttcctaactctgcttttacaagagtttccttatcacttactgaatacccattgtgtctttttcccttaattgcctgagaggaaccatctatcttcctgtcctgaagggagttcttcctaagtctggtcggacctttgtatagtaattaactaagatttagat

SEQ ID NO: 3501 - DNA, 1101 bp, Homo sapiens
cggtcgcaaattgcgagaatttgggaagggaatctttatcttctcgtctagttctccgaggttgaaggctcggcctgctcagagaaggaaactgaggtccaccgagttggagaaacctactcaacaccagagtttcctgaataagtttttcccaagttctgtgttattctttttgatgaaaggatactggcttccctacaatcatcttttcaacttctaaaatgtttaattttttaaattgaggactaacttcttcagtgcttagagtgtgagaaaaatggcaaatatgaatagtgattctaggcatcttggcacctctgaggtagatcatgaaagagatcctggacctatgaatatccagtttgagccatcggatctaagatccaaaaggcctttctgtatagagcccacaaacatcgtgaatgtgaatcatgtcattcagagggttagtgaccatgcctctgccatgaacaagagaattcattactacagccggctcaccactcctgcagacaaggcactgattgccccagaccatgtagttccagctccagaagagtgctatgtgtatagtccattgggctctgcttataaacttcaaagttacactgaaggatacggtaaaaacaccagtttagtaaccatttttatgatttggaataccatgatgggaacatctatactaagcattccttggggcataaaacaggctggatttactactggaatgtgtgtcatcatactgatgggccttttaacactttattgctgctacagagtagtgaaatcacggactatgatgttttcgttggataccactagctgggaatatccagatgtctgcagacattatttcggctcctttgggcagtggtcgagtctccttttctccttggtgtctctcattggagcaatgatagtttattgggtgcttatgtcaaattttctttttaatactggaaagtttatttttagtaagtatctatatcatatgcttttaacacagtactttcaaatactattaccactgtaatgttagttctagccttaaattctaggacttgggataaataaaataagaagtaacatatataattttgg

SEQ ID NO: 3502 - protein, 251 aa, Homo sapiens
MANMNSDSRHLGTSEVDHERDPGPMNIQFEPSDLRSKRPFCIEPTNIVNVNHVIQRVSDHASAMNKRIHYYSRLTTPADKALIAPDHVVPAPEECYVYSPLGSAYKLQSYTEGYGKNTSLVTIFMIWNTMMGTSILSIPWGIKQAGFTTGMCVIILMGLLTLYCCYRVVKSRTMMFSLDTTSWEYPDVCRHYFGSFGQWSSLLFSLVSLIGAMIVYWVLMSNFLFNTGKFIFSKYLYHMLLTQYFQILLPL

SEQ ID NO: 3503 - DNA, 2037 bp, Homo sapiens
cggtcgcaaattgcgagaatttgggaagggaatctttatcttctcgtctagttctccgaggttgaaggctcggcctgctcagagaaggaaactgaggtccaccgagttggagaaacctactcaacaccagagtttcctgaataagtttttcccaagttctgtgttattctttttgatgaaaggatactggcttccctacaatcatcttttcaacttctaaaatgtttaattttttaaattgaggactaacttcttcagtgcttagagtgtgagaaaaatggcaaatatgaatagtgattctaggcatcttggcacctctgaggtagatcatgaaagagatcctggacctatgaatatccagtttgagccatcggatctaagatccaaaaggcctttctgtatagagcccacaaacatcgtgaatgtgaatcatgtcattcagagggttagtgaccatgcctctgccatgaacaagagaattcattactacagccggctcaccactcctgcagacaaggcactgattgccccagaccatgtagttccagctccagaagagtgctatgtgtatagtccattgggctctgcttataaacttcaaagttacactgaaggatacggtaaaaacaccagtttagtaaccatttttatgatttggaataccatgatgggaacatctatactaagcattccttggggcataaaacaggctggatttactactggaatgtgtgtcatcatactgatgggccttttaacactttattgctgctacagagtagtgaaatcacggactatgatgttttcgttggataccactagctgggaatatccagatgtctgcagacattatttcggctcctttgggcagtggtcgagtctccttttctccttggtgtctctcattggagcaatgatagtttattgggtgcttatgtcaaattttctttttaatactggaaagtttatttttaattttattcatcacattaatgacacagacactatactgagtaccaataatagcaaccctgtgatttgtccaagtgccgggagtggaggccatcctgacaacagctctatgattttctatgccaatgacacaggagcccaacagtttgaaaagtggtgggataagtccaggacagtccccttttatcttgtagggctcctcctcccactgctcaatttcaagtctccttcatttttttcaaaatttaatatcctaggcacagtgtctgtcctttatttgattttccttgtcacctttaaggctgttcgcttgggatttcatttggaatttcattggtttataccaacagaattttttgtaccagagataagatttcagtttccacagctgactggagtgcttacccttgctttttttattcataattgtatcatcacactcttgaagaacaacaagaaacaagaaaacaatgtgagggacttgtgcattgcttatatgctggtgacattaacttatctctatattggagtcctggtttttgcttcatttccttcaccaccattatccaaagattgtattgagcagaattttttagacaacttccctagcagtgacaccctgtccttcattgcaaggatattcctgctgttccagatgatgactgtatacccactcttaggctacctggctcgtgtccagcttttgggccatatcttcggtgacatttatcctagcattttccatgtgctgattcttaatctaattattgtgggagctggagtgatcatggcctgtttctacccaaacataggagggatcataagatattcaggagcagcatgtggactggcctttgtattcatatacccatctctcatctatataatttccctccaccaagaagagcgtctgacatggcctaaattaatcttccacgttttcatcatcattttgggcgtggctaacctgattgttcagttttttatgtgaaatacctcaactgtttttttcaagagctctcatgatattttgagccttgacaacagttctatataaattcactt

SEQ ID NO: 3504 - protein, 561 aa, Homo sapiens
MANMNSDSRHLGTSEVDHERDPGPMNIQFEPSDLRSKRPFCIEPTNIVNVNHVIQRVSDHASAMNKRIHYYSRLTTPADKALIAPDHVVPAPEECYVYSPLGSAYKLQSYTEGYGKNTSLVTIFMIWNTMMGTSILSIPWGIKQAGFTTGMCVIILMGLLTLYCCYRVVKSRTMMFSLDTTSWEYPDVCRHYFGSFGQWSSLLFSLVSLIGAMIVYWVLMSNFLFNTGKFIFNFIHHINDTDTILSTNNSNPVICPSAGSGGHPDNSSMIFYANDTGAQQFEKWWDKSRTVPFYLVGLLLPLLNFKSPSFFSKFNILGTVSVLYLIFLVTFKAVRLGFHLEFHWFIPTEFFVPEIRFQFPQLTGVLTLAFFIHNCIITLLKNNKKQENNVRDLCIAYMLVTLTYLYIGVLVFASFPSPPLSKDCIEQNFLDNFPSSDTLSFIARIFLLFQMMTVYPLLGYLARVQLLGHIFGDIYPSIFHVLILNLIIVGAGVIMACFYPNIGGIIRYSGAACGLAFVFIYPSLIYIISLHQEERLTWPKLIFHVFIIILGVANLIVQFFM
